(19) United States
(12) Patent Application Publication
(10) Pub. No.: US 2024/0417722 A1
(43) Pub. Date: Dec. 19, 2024

(54) COMPOSITIONS AND METHODS FOR IMMUNOONCOLOGY

(71) Applicants: NOVARTIS AG, Basel (CH); INTELLIA THERAPEUTICS, INC., Cambridge, MA (US)

(72) Inventors: Ming-Wei CHEN, Winchester, MA (US); Melissa DECK, Acton, MA (US); Glenn DRANOFF, Lexington, MA (US); Craig Stephen MICKANIN, Hopkinton, MA (US); Reynald LESCARBEAU, Dracut, MA (US); Celeste RICHARDSON, Brookline, MA (US); Morag STEWART, Boston, MA (US); Yi YANG, Belmont, MA (US)

(21) Appl. No.: 18/534,209

(22) Filed: Dec. 8, 2023

Related U.S. Application Data
(63) Continuation of application No. 15/780,751, filed on Jun. 1, 2018, now Pat. No. 12,037,583.
(60) Provisional application No. 62/394,290, filed on Sep. 14, 2016.
(60) Provisional application No. 62/316,784, filed on Apr. 1, 2016.
(60) Provisional application No. 62/263,169, filed on Dec. 4, 2015.

(51) Int. Cl. C12N 15/113; A61K 9/00; A61K 31/7088; A61K 38/17; A61K 38/46; A61K 39/00; A61K 45/06; C12N 5/0783; C12N 15/09; C12N 15/10

(52) U.S. Cl. CPC C12N 15/113; A61K 9/0009; A61K 31/7088; A61K 38/177; A61K 38/1774; A61K 38/465; A61K 39/4611; A61K 39/4631; A61K 39/4632; A61K 39/464411; A61K 39/464412; A61K 39/464417; A61K 45/06; A61K 2239/26; C12N 5/0636; C12N 15/09; C12N 15/102; C12N 15/1135; C12N 15/1138; C12N 2310/10; C12N 2310/20; C12N 2310/315; C12N 2310/321; C12N 2320/32; C12N 2320/35; C12N 2510/00; Y02A 50/30

(57) ABSTRACT

The present invention is directed to genome editing systems, reagents and methods for immunooncology.

### RELATED APPLICATIONS

[0001] This application is a continuation of U.S. Utility application Ser. No. 15/780,751 filed Jun. 1, 2018, which is a U.S. National Phase filing of the International Application Serial No. PCT/IB2016/057318 filed Dec. 2, 2016, which claims priority to U.S. Provisional patent application No. 62/263,169, filed Dec. 4, 2015, U.S. Provisional patent application No. 62/316,784, filed Apr. 1, 2016, and U.S. Provisional patent application No. 62/394,290, filed Sep. 14, 2016. The entire contents of these applications are incorporated herein by reference.

### SEQUENCE LISTING

[0002] The instant application contains a Sequence Listing which has been submitted electronically in XML file format and is hereby incorporated by reference in its entirety. Said XML copy, created on Feb. 19, 2024, is named 14452_0004-01000_SL.xml and is 10,303,141 bytes in size.

### BACKGROUND

[0003] CRISPRs (Clustered Regularly Interspaced Short Palindromic Repeats) evolved in bacteria as an adaptive immune system to defend against viral attack. Upon exposure to a virus, short segments of viral DNA are integrated into the CRISPR locus of the bacterial genome. RNA is transcribed from a portion of the CRISPR locus that includes the viral sequence. That RNA, which contains sequence complimentary to the viral genome, mediates targeting of a Cas9 protein to the sequence in the viral genome. The Cas9 protein cleaves and thereby silences the viral target.

[0004] Recently, the CRISPR/Cas system has been adapted for genome editing in eukaryotic cells. The introduction of site-specific single (SSBs) or double strand breaks (DSBs) allows for target sequence alteration through, for example, non-homologous end-joining (NHEJ) or homology-directed repair (HDR).

### SUMMARY OF THE INVENTION

[0005] The inventions described herein relate to compositions and methods for immunooncology, for example, cells modified at specific target sequences in their genome, including as modified by introduction of CRISPR systems that include gRNA molecules which target said target sequences, and methods of making and using therefore. For example, the present disclosure relates to gRNA molecules, CRISPR systems, cells, and methods useful for genome editing of cells, e.g., T cells, e.g., T-cells further engineered to express a chimeric antigen receptor, and useful for treating diseases such as cancers. In a first aspect, the invention provides a gRNA molecule including a tracr and crRNA, wherein the crRNA includes a targeting domain that is complementary with a target sequence of an allogeneic T-cell target selected from B2M, CD247, CD3D, CD3 E, CD3G, TRAC, TRBC1, TRBC2, HLA-A, HLA-B, HLA-C, DCK, CD52, FKBP1A, CIITA, NLRC5, RFXANK, RFX5, RFXAP, or NR3C1.

[0006] In embodiments of the gRNA molecule:
[0007] 2(a) the allogeneic T-cell target is B2M, and the targeting domain includes any one of SEQ ID NO: 1 to SEQ ID NO: 83 or SEQ ID NO: 5492 to SEQ ID NO: 5527;
[0008] 2(b) the allogeneic T-cell target is TRAC, and the targeting domain includes any one of SEQ ID NO: 5528 to SEQ ID NO: 5623 or SEQ ID NO: 5816 to SEQ ID NO: 5965;
[0009] 2(c) the allogeneic T-cell target is TRBC1, and the targeting domain includes any one of SEQ ID NO: 5624 to SEQ ID NO: 5643 or SEQ ID NO: 5966 to SEQ ID NO: 6097;
[0010] 2(d) the allogeneic T-cell target is TRBC2, and the targeting domain includes any one of SEQ ID NO: 5644 to SEQ ID NO: 5719 or SEQ ID NO: 6098 to SEQ ID NO: 6226;
[0011] 2(e) the allogeneic T-cell target is CD247, and the targeting domain includes any one of SEQ ID NO: 84 to SEQ ID NO: 392;
[0012] 2(f) the allogeneic T-cell target is CD3D, and the targeting domain includes any one of SEQ ID NO: 393 to SEQ ID NO: 532 or SEQ ID NO: 10780 to SEQ ID NO: 10794;
[0013] 2(g) the allogeneic T-cell target is CD3 E, and the targeting domain includes any one of SEQ ID NO: 533 to SEQ ID NO: 839 or SEQ ID NO: 10677 to SEQ ID NO: 10764;
[0014] 2(h) the allogeneic T-cell target is CD3G, and the targeting domain includes any one of SEQ ID NO: 840 to SEQ ID NO: 968 or SEQ ID NO: 10765 to SEQ ID NO: 10779;
[0015] 2(i) the allogeneic T-cell target is HLA-A, and the targeting domain includes any one of SEQ ID NO: 969 to SEQ ID NO: 1345;
[0016] 2(j) the allogeneic T-cell target is HLA-B, and the targeting domain includes any one of SEQ ID NO: 1346 to SEQ ID NO: 1698;
[0017] 2(k) the allogeneic T-cell target is HLA-C, and the targeting domain includes any one of SEQ ID NO: 1699 to SEQ ID NO: 2068;
[0018] 2(l) the allogeneic T-cell target is DCK, and the targeting domain includes any one of SEQ ID NO: 5278 to SEQ ID NO: 5491;
[0019] 2(m) the allogeneic T-cell target is CD52, and the targeting domain includes any one of SEQ ID NO: 6227 to SEQ ID NO: 6324;
[0020] 2(n) the allogeneic T-cell target is FKBP1A, and the targeting domain includes any one of SEQ ID NO: 6325 to SEQ ID NO: 6583 or SEQ ID NO: 6662 to SEQ ID NO: 6749;
[0021] 2(o) the allogeneic T-cell target is NR3C1, and the targeting domain includes any one of SEQ ID NO: 2069 to SEQ ID NO: 2941;
[0022] 2(p) the allogeneic T-cell target is CIITA, and the targeting domain includes any one of SEQ ID NO: 6750 to SEQ ID NO: 7716 or SEQ ID NO: 7717 to SEQ ID NO: 7804; or
[0023] 2(q) the allogeneic T-cell target is NLRC5, and the targeting domain includes any one of SEQ ID NO: 8622 to SEQ ID NO: 10089.

[0024] In embodiments of the gRNA molecule, the allogeneic T-cell target is TRAC, and the targeting domain includes SEQ ID NO: 5569, SEQ ID NO: 5585, SEQ ID NO: 5587, SEQ ID NO: 5592, SEQ ID NO: 5601, SEQ ID NO: 5589, SEQ ID NO: 5600, SEQ ID NO: 5594, SEQ ID NO: 5571, SEQ ID NO: 5593, SEQ ID NO: 5574, SEQ ID NO: 5598, SEQ ID NO: 5586, SEQ ID NO: 5599, SEQ ID NO: 5591, SEQ ID NO: 5610, SEQ ID NO: 5608, SEQ ID NO: 5617, SEQ ID NO: 5619, or SEQ ID NO: 5620, for example, the targeting domain includes SEQ ID NO: 5569, SEQ ID NO: 5586, SEQ ID NO: 5587, SEQ ID NO: 5592, SEQ ID NO: 5599, or SEQ ID NO: 5600, for example, targeting domain includes SEQ ID NO: 5569, SEQ ID NO: 5587, SEQ ID NO: 5592 or SEQ ID NO: 5586, for example, the targeting domain includes SEQ ID NO: 5569.

[0025] In embodiments of the gRNA molecule, the allogeneic T-cell target is TRBC2, and the targeting domain includes SEQ ID NO: 5719, SEQ ID NO: 5694, SEQ ID NO: 5706, SEQ ID NO: 5696, SEQ ID NO: 5711, SEQ ID NO: 5708, SEQ ID NO: 5709, SEQ ID NO: 5712, SEQ ID NO: 5703, SEQ ID NO: 5707, SEQ ID NO: 5687, SEQ ID NO: 5705, SEQ ID NO: 5713, SEQ ID NO: 5715, or SEQ ID NO: 5710.

[0026] In embodiments of the gRNA molecule, the allogeneic T-cell target is B2M, and the targeting domain includes SEQ ID NO: 5519, SEQ ID NO: 5497, SEQ ID NO: 5499, SEQ ID NO: 5498, SEQ ID NO: 5503, SEQ ID NO: 5496, SEQ ID NO: 5507, SEQ ID NO: 5515, SEQ ID NO: 5493, SEQ ID NO: 5506, SEQ ID NO: 5509, SEQ ID NO: 5517, SEQ ID NO: 5521, SEQ ID NO: 5520, SEQ ID NO: 5500, SEQ ID NO: 5494, SEQ ID NO: 5508, SEQ ID NO: 5514, or SEQ ID NO: 5492, for example, the targeting domain includes SEQ ID NO: 5496, SEQ ID NO: 5498, or SEQ ID NO: 5509.

[0027] In embodiments of the gRNA molecule, the allogeneic T-cell target is CIITA, and the targeting domain includes SEQ ID NO: 7771, SEQ ID NO: 7769, SEQ ID NO: 7773, SEQ ID NO: 7726, SEQ ID NO: 7758, SEQ ID NO: 7739, SEQ ID NO: 7779, SEQ ID NO: 7770, SEQ ID NO: 7749, SEQ ID NO: 7754, SEQ ID NO: 7745, SEQ ID NO: 7785, SEQ ID NO: 7731, SEQ ID NO: 7772, SEQ ID NO: 7743, or SEQ ID NO: 7750, for example, the targeting domain includes SEQ ID NO: 7769, SEQ ID NO: 7771, SEQ ID NO: 7739, or SEQ ID NO: 7785.

[0028] In embodiments of the gRNA molecule, the allogeneic T-cell target is CD3 E, and the targeting domain includes SEQ ID NO: 10729, SEQ ID NO: 10719, SEQ ID NO: 10764, SEQ ID NO: 10789, SEQ ID NO: 10701, SEQ ID NO: 10700, or SEQ ID NO: 10722.

[0029] In embodiments of the gRNA molecule, the allogeneic T-cell target is FKBP1A, and the targeting domain includes SEQ ID NO: 6693, SEQ ID NO: 6705, SEQ ID NO: 6694, SEQ ID NO: 6708, or SEQ ID NO: 6699.

[0030] In a second aspect, the invention provides a gRNA molecule including a tracr and crRNA, wherein the crRNA includes a targeting domain that is complementary with a target sequence of an inhibitory molecule or downstream effector of signaling through an inhibitory molecule selected from CD274, HAVCR2, LAG3, PDCD1, PD-L2, CTLA4, CEACAM (e.g., CEACAM-1, CEACAM-3 and/or CEACAM-5), VISTA, BTLA, TIGIT, LAIR1, CD160, 2B4, CD80, CD86, B7-H3 (CD113), B7-H4 (VTCN1), HVEM (TNFRSF14 or CD107), KIR, A2aR, MHC class I, MHC class II, GAL9, adenosine, and TGF beta, or PTPN11.

[0031] In embodiments of the gRNA molecule:
[0032] 15(a) the inhibitory molecule is CD274 (PD-L1), and the targeting domain includes any one of SEQ ID NO: 2942 to SEQ ID NO: 3270;
[0033] 15(b) the inhibitory molecule is HAVCR2 (TIM3), and the targeting domain includes any one of SEQ ID NO: 3271 to SEQ ID NO: 3541;
[0034] 15(c) the inhibitory molecule is LAG3, and the targeting domain includes any one of SEQ ID NO: 3542 to SEQ ID NO: 4032;
[0035] 15(d) the inhibitory molecule is PDCD1 (PD-1), and the targeting domain includes any one of SEQ ID NO: 4033 to SEQ ID NO: 4589 or SEQ ID NO: 5720 to SEQ ID NO: 5815; or
[0036] 15(e) the downstream effector of signaling through an inhibitory molecule is PTPN1, and the targeting domain includes any one of SEQ ID NO: 4590 to SEQ ID NO: 5277.

[0037] In embodiments of the gRNA molecule, the inhibitory molecule is PDCD1, and the targeting domain includes SEQ ID NO: 5743, SEQ ID NO: 5798, SEQ ID NO: 5748, SEQ ID NO: 5722, SEQ ID NO: 5800, SEQ ID NO: 5735, SEQ ID NO: 5724, SEQ ID NO: 5731, SEQ ID NO: 5725, SEQ ID NO: 5775, SEQ ID NO: 5766, SEQ ID NO: 5727, SEQ ID NO: 5744, SEQ ID NO: 5751, or SEQ ID NO: 5734, for example, the targeting domain includes SEQ ID NO: 5775.

[0038] In embodiments of the gRNA molecule, including in any of the aforementioned aspects and embodiments, the targeting domain includes 17, 18, 19, 20, 21 (if present in the reference sequence), 22 (if present in the reference sequence), 23 (if present in the reference sequence), 24 (if present in the reference sequence), or 25 (if present in the reference sequence) consecutive nucleic acids of any one of the recited targeting domain sequences. In other embodiments of the gRNA molecule, including in any of the aforementioned aspects and embodiments, the targeting domain consists of 17, 18, 19, 20, 21 (if present in the reference sequence), 22 (if present in the reference sequence), 23 (if present in the reference sequence), or 24 (if present in the reference sequence), or 25 (if present in the reference sequence) consecutive nucleic acids of any one of the recited targeting domain sequences. In embodiments of the gRNA molecule, including in any of the aforementioned aspects and embodiments, the 17, 18, 19, 20, 21 (if present in the reference sequence), 22 (if present in the reference sequence), 23 (if present in the reference sequence), or 24 (if present in the reference sequence), or 25 (if present in the reference sequence) consecutive nucleic acids of any one of the recited targeting domain sequences are the 17, 18, 19, 20, 21 (if present in the reference sequence), 22 (if present in the reference sequence), 23 (if present in the reference sequence), or 24 (if present in the reference sequence), or 25 (if present in the reference sequence) consecutive nucleic acids disposed at the 3′ end of the recited targeting domain sequence. In other embodiments of the gRNA molecule, including in any of the aforementioned aspects and embodiments, the 17, 18, 19, 20, 21 (if present in the reference sequence), 22 (if present in the reference sequence), 23 (if present in the reference sequence), or 24 (if present in the reference sequence), or 25 (if present in the reference sequence) consecutive nucleic acids of any one of the recited targeting domain sequences are the 17, 18, 19, 20, 21 (if present in the reference sequence), 22 (if present in the reference sequence), 23 (if present in the reference sequence), or 24 (if present in the reference sequence), or 25 (if present in the reference sequence) consecutive nucleic acids disposed at the 5′ end of the recited targeting domain sequence. In other embodiments of the gRNA molecule, including in any of the aforementioned aspects and embodiments, the 17, 18, 19, 20, 21 (if present in the reference sequence), 22 (if present in the reference sequence), 23 (if present in the reference sequence), or 24 (if present in the reference sequence), or 25 (if present in the reference sequence) consecutive nucleic acids of any one of the recited targeting domain sequences do not include either the 5′ or 3′ nucleic acid of the recited targeting domain sequence.

[0039] In embodiments of the gRNA molecule, including in any of the aforementioned aspects and embodiments, the targeting domain consists of the recited targeting domain sequence.

[0040] The following general aspects of the gRNA molecule may be combined, alone or in combination, with any of the gRNAs comprising a targeting domain described herein, for example, a targeting domain recited in any of the aforementioned aspects and embodiments.

[0041] In embodiments of the gRNA molecule, including in any of the aforementioned aspects and embodiments, a portion of the crRNA and a portion of the tracr hybridize to form a flagpole including SEQ ID NO: 6584 or SEQ ID NO: 6585. In other embodiments, the flagpole further includes a first flagpole extension, located 3′ to the crRNA portion of the flagpole, wherein said first flagpole extension includes SEQ ID NO: 6586. In other embodiments, the flagpole further includes a second flagpole extension located 3′ to the crRNA portion of the flagpole and, if present, the first flagpole extension, wherein said second flagpole extension includes SEQ ID NO: 6587.

[0042] In embodiments of the gRNA molecule, including in any of the aforementioned aspects and embodiments, the tracr includes, for example, consists of:
[0043] (a) SEQ ID NO: 7820, optionally further including, at the 3′ end, an additional 1, 2, 3, 4, 5, 6, or 7 uracil (U) nucleotides;
[0044] (b) SEQ ID NO: 6660; or
[0045] (c) SEQ ID NO: 6661. In such embodiments, the crRNA portion of the flagpole includes SEQ ID NO: 6607 or SEQ ID NO: 6608.

[0046] In embodiments of the gRNA molecule, including in any of the aforementioned aspects and embodiments, the tracr includes SEQ ID NO: 6589 or SEQ ID NO: 6590, and optionally, if a first flagpole extension is present, a first tracr extension, disposed 5′ to SEQ ID NO: 6589 or SEQ ID NO: 6590, said first tracr extension including SEQ ID NO: 6591.

[0047] In embodiments of the gRNA molecule, including in any of the aforementioned aspects and embodiments, the targeting domain and the tracr are disposed on separate nucleic acid molecules.

[0048] In embodiments of the gRNA molecule, including in any of the aforementioned aspects and embodiments, the crRNA includes (for example, consists of), from 5′ to 3′, [targeting domain]—:
[0049] a) SEQ ID NO: 6584;
[0050] b) SEQ ID NO: 6585;
[0051] c) SEQ ID NO: 6605;
[0052] d) SEQ ID NO: 6606;
[0053] e) SEQ ID NO: 6607;
[0054] f) SEQ ID NO: 6608; or
[0055] g) SEQ ID NO: 7806.

[0056] In embodiments of the gRNA molecule, including in any of the aforementioned aspects and embodiments, the tracr includes (for example, consists of), from 5′ to 3′:
[0057] a) SEQ ID NO: 6589;
[0058] b) SEQ ID NO: 6590;
[0059] c) SEQ ID NO: 6609;
[0060] d) SEQ ID NO: 6610;
[0061] e) SEQ ID NO: 6660;
[0062] f) SEQ ID NO: 6661;
[0063] g) SEQ ID NO: 7820;
[0064] h) SEQ ID NO: 7807;
[0065] i) SEQ ID NO: 7808;
[0066] j) SEQ ID NO: 7809;
[0067] k) any of a) to j), above, further including, at the 3′ end, at least 1, 2, 3, 4, 5, 6 or 7 uracil (U) nucleotides, e.g., 1, 2, 3, 4, 5, 6, or 7 uracil (U) nucleotides;
[0068] l) any of a) to k), above, further including, at the 3′ end, at least 1, 2, 3, 4, 5, 6 or 7 adenine (A) nucleotides, e.g., 1, 2, 3, 4, 5, 6, or 7 adenine (A) nucleotides; or
[0069] m) any of a) to 1), above, further including, at the 5′ end (e.g., at the 5′ terminus), at least 1, 2, 3, 4, 5, 6 or 7 adenine (A) nucleotides, e.g., 1, 2, 3, 4, 5, 6, or 7 adenine (A) nucleotides.

[0070] In preferred embodiments of the gRNA molecule, including in any of the aforementioned aspects and embodiments, the targeting domain and the tracr are disposed on separate nucleic acid molecules, and the nucleic acid molecule including the targeting domain includes SEQ ID NO: 6607, optionally disposed immediately 3′ to the targeting domain, and the nucleic acid molecule including the tracr includes, e.g., consists of, SEQ ID NO: 6660.

[0071] In other embodiments of the gRNA molecule, including in any of the aforementioned aspects and embodiments, the targeting domain and the tracr are disposed on a single nucleic acid molecule, and wherein the tracr is disposed 3′ to the targeting domain. In such embodiments of the gRNA molecule, including in any of the aforementioned aspects and embodiments, the gRNA molecule further includes a loop, disposed 3′ to the targeting domain and 5′ to the tracr, for example, a loop that includes (for example, consists of) SEQ ID NO: 6588.

[0072] In embodiments of the gRNA molecule, including in any of the aforementioned aspects and embodiments, the gRNA molecule includes (for example, consists of), from 5′ to 3′, [targeting domain]—:
[0073] (a) SEQ ID NO: 6601;
[0074] (b) SEQ ID NO: 6602;
[0075] (c) SEQ ID NO: 6603;
[0076] (d) SEQ ID NO: 6604;
[0077] (e) SEQ ID NO: 7811; or
[0078] (f) any of (a) to (e), above, further including, at the 3′ end, 1, 2, 3, 4, 5, 6 or 7 uracil (U) nucleotides.

[0079] In preferred embodiments of the gRNA molecule, including in any of the aforementioned aspects and embodiments, the targeting domain and the tracr are disposed on a single nucleic acid molecule, and wherein said nucleic acid molecule includes, e.g., consists of, said targeting domain and SEQ ID NO: 6601, optionally disposed immediately 3′ to said targeting domain.

[0080] In preferred embodiments of the gRNA molecule, including in any of the aforementioned aspects and embodiments, the targeting domain and the tracr are disposed on a single nucleic acid molecule, and wherein said nucleic acid molecule includes, e.g., consists of, said targeting domain and SEQ ID NO: 7811, optionally disposed immediately 3′ to said targeting domain.

[0081] In embodiments, the gRNA molecule consists of unmodified RNA nucleotides and nucleic acid bonds. In other embodiments, the gRNA molecule contains one or more modifications, for example as described herein. In embodiments of the gRNA molecule, including in any of the aforementioned aspects and embodiments, one, or optionally more than one, of the nucleic acid molecules of the gRNA molecule includes:
[0082] a) a, e.g., three, phosphorothioate modification(s) at the 3′ end of said nucleic acid molecule or molecules;
[0083] b) a, e.g., three, phosphorothioate modification(s) at the 5′ end of said nucleic acid molecule or molecules;
[0084] c) a, e.g., three, 2′-O-methyl modification(s) at the 3′ end of said nucleic acid molecule or molecules;
[0085] d) a, e.g., three, 2′-O-methyl modification(s) at the 5′ end of said nucleic acid molecule or molecules;
[0086] e) a 2′ O-methyl modification at each of the 4^{th}-to-terminal, 3^{rd}-to-terminal, and 2^{nd}-to-terminal 3′ residues of said nucleic acid molecule or molecules; or
[0087] f) any combination thereof.

[0088] In embodiments of the gRNA molecule, including in any of the aforementioned aspects and embodiments, when a CRISPR system (e.g., an RNP as described herein, e.g., an RNP that includes a Cas9 molecule, for example as described herein) including the gRNA molecule (e.g., as described herein) is introduced into a cell, an indel is formed at or near the target sequence complementary to the targeting domain of the gRNA molecule. In embodiments, the indel is a frameshift mutation. In embodiments, the indel is an indel listed in any of FIG. 34A, FIG. 34B, FIG. 36, FIG. 38, FIG. 41, FIG. 44, FIG. 48, FIG. 49, FIG. 50 or FIG. 53.

[0089] In embodiments of the gRNA molecule, including in any of the aforementioned aspects and embodiments, when a CRISPR system (e.g., an RNP as described herein, e.g., an RNP that includes a Cas9 molecule, for example as described herein) including the gRNA molecule (e.g., as described herein) is introduced into a population of cells, an indel is formed at or near the target sequence complementary to the targeting domain of the gRNA molecule in at least about 40%, e.g., at least about 50%, e.g., at least about 60%, e.g., at least about 70%, e.g., at least about 80%, e.g., at least about 90%, e.g., at least about 95%, e.g., at least about 96%, e.g., at least about 97%, e.g., at least about 98%, e.g., at least about 99%, of the cells of the population. In embodiments, an indel that is a frameshift mutation is formed at or near the target sequence complementary to the targeting domain of the gRNA molecule in at least about 20%, e.g., at least about 30%, e.g., at least about 35%, e.g., at least about 40%, e.g., at least about 45%, e.g., at least about 50%, e.g., at least about 55%, e.g., at least about 60%, e.g., at least about 65%, e.g., at least about 70%, e.g., at least about 75%, e.g., at least about 80%, e.g., at least about 85%, e.g., at least about 90%, e.g., at least about 95%, e.g., at least about 99%, of the cells of the population. In embodiments, in at least about 30%, e.g., least about 40%, e.g., at least about 50%, e.g., at least about 60%, e.g., at least about 70%, e.g., at least about 80%, e.g., at least about 90%, e.g., at least about 95%, e.g., at least about 96%, e.g., at least about 97%, e.g., at least about 98%, e.g., at least about 99%, of the cells of the population, the indel is an indel listed in any of FIG. 34A, FIG. 34B, FIG. 36, FIG. 38, FIG. 41, FIG. 44, FIG. 48, FIG. 49, FIG. 50 or FIG. 53. In embodiments, the five most frequently detected indels in said population of cells include three or more, e.g., four, e.g., five, of the indels associated with any gRNA listed in any of FIG. 34A, FIG. 34B, FIG. 36, FIG. 38, FIG. 41, FIG. 44, FIG. 48, FIG. 49, FIG. 50 or FIG. 53. The indel or indel pattern is as measured and/or quantitated by, for example, next generation sequencing (NGS).

[0090] In embodiments of the gRNA molecule, including in any of the aforementioned aspects and embodiments, when a CRISPR system (e.g., an RNP as described herein, e.g., an RNP that includes a Cas9 molecule, for example as described herein) including the gRNA molecule (e.g., as described herein) is introduced into a cell (or population of cells) as described herein, expression of the gene including the target sequence complementary to the targeting domain of the gRNA molecule is reduced or eliminated in said cell. In embodiments, expression of said gene is reduced or eliminated in at least about 40%, e.g., at least about 50%, e.g., at least about 60%, e.g., at least about 70%, e.g., at least about 80%, e.g., at least about 90%, e.g., at least about 95%, e.g., at least about 96%, e.g., at least about 97%, e.g., at least about 98%, e.g., at least about 99%, of the cells of the population. In embodiments, the reduced or eliminated expression is measured by flow cytometry. In other embodiments, for example, in the case of FKBP1A, reduced or eliminated expression is measured by a functional assay, for example as described herein.

[0091] In embodiments of the gRNA molecule, including in any of the aforementioned aspects and embodiments, when a CRISPR system (e.g., an RNP as described herein, e.g., an RNP that includes a Cas9 molecule, for example as described herein) including the gRNA molecule (e.g., as described herein) is introduced into a cell as described herein, no off-target indels are formed in said cell, e.g., as detectible by next generation sequencing and/or a nucleotide insertional assay, for example as described herein.

[0092] In embodiments of the gRNA molecule, including in any of the aforementioned aspects and embodiments, when a CRISPR system (e.g., an RNP as described herein, e.g., an RNP that includes a Cas9 molecule, for example as described herein) including the gRNA molecule (e.g., as described herein) is introduced into a population of cells as described herein, an off-target indel is detected in no more than about 5%, e.g., no more than about 1%, e.g., no more than about 0.1%, e.g., no more than about 0.01%, of the cells of the population of cells e.g., as detectible by next generation sequencing and/or a nucleotide insertional assay.

[0093] In any of the aforementioned aspects and embodiments reciting a cell, the cell is (or population of cells includes) a mammalian, primate, or human cell, e.g., is a human cell. In any of the aforementioned aspects and embodiments reciting a cell, the cell is (or population of cells includes) an immune effector cell, for example, a T cell or NK cell, e.g., is a T cell, for example, a CD4+ T cell, a CD8+ T cell, or a combination thereof.

[0094] In any of the aforementioned aspects and embodiments reciting a cell, the cell (or population of cells) has been, or will be, engineered to express a chimeric antigen receptor (CAR). In embodiments, the CAR is:
[0095] (a) a CD19 CAR; or
[0096] (b) a BCMA CAR. In embodiments:
[0097] (a) the CAR is a CD19 CAR including an antigen binding domain including any one of SEQ ID NO: 7883 to SEQ ID NO: 7898;
[0098] (b) the CAR is a CD19 CAR including SEQ ID NO: 7909 or SEQ ID NO: 7920;
[0099] (c) the CAR is a BCMA CAR including an antigen binding domain including any one of SEQ ID NO: 7939 to SEQ ID NO: 8112, e.g., including an antigen binding domain of SEQ ID NO: 7949; or
[0100] (d) the CAR is a BCMA CAR including any one of SEQ ID NO: 8549 to SEQ ID NO: 8621, e.g., including SEQ ID NO: 8559.

[0101] In any of the aforementioned aspects and embodiments reciting a cell, the cell is allogeneic with respect to a patient to be administered said cell. In other embodiments, the cell is autologous with respect to a patient to be administered said cell.

[0102] In another aspect, the invention provides a composition including a first gRNA molecule of any of the previous aspects and embodiments, further including a Cas9 molecule. In embodiments, the Cas9 molecule includes, e.g., consists of, any one of SEQ ID NO: 6611 or SEQ ID NO: 7821 to SEQ ID NO: 7831. In embodiments, the Cas9 molecule is an active or inactive S. pyogenes Cas9. In preferred embodiments, the first gRNA molecule and Cas9 molecule are present in a ribonuclear protein complex (RNP).

[0103] In aspects, the composition may include more than one gRNA molecule, for example, more than one gRNA molecule, each of which is complexed with a Cas9 molecule described herein. For example, in embodiments, the composition further includes a second gRNA molecule; a second gRNA molecule and a third gRNA molecule; or a second gRNA molecule, a third gRNA molecule, and a fourth gRNA molecule, wherein the second gRNA molecule, the third gRNA molecule (if present), and the fourth gRNA molecule (if present) are a gRNA molecule as described herein, for example, a gRNA molecule of any of the previous aspects and embodiments, and wherein each gRNA molecule of the composition is complementary to a different target sequence (i.e., comprises a different targeting domain). In embodiments, the first gRNA molecule, the second gRNA molecule, the third gRNA molecule (if present), and the fourth gRNA molecule (if present) are complementary to target sequences within the same gene. In such embodiments, the first gRNA molecule, the second gRNA molecule, the third gRNA molecule (if present), and the fourth gRNA molecule (if present) are complementary to target sequences not more than 20000 nucleotides, not more than 10000 nucleotides, not more than 6000, not more than 5000 nucleotides, not more than 4000, not more than 1000 nucleotides, not more than 500 nucleotides, not more than 400 nucleotides, not more than 300 nucleotides, not more than 200 nucleotides, not more than 100 nucleotides, not more than 90 nucleotides, not more than 80 nucleotides, not more than 70 nucleotides, not more than 60 nucleotides, not more than 50 nucleotides, not more than 40 nucleotides, not more than 30 nucleotides, not more than 20 nucleotides or not more than 10 nucleotides apart. In other embodiments the first gRNA molecule, the second gRNA molecule, the third gRNA molecule (if present), and the fourth gRNA molecule (if present) are complementary to target sequence within different genes or loci, for example, different genes as described herein.

[0104] In embodiments, the first gRNA molecule is the gRNA molecule of any of 2(b), 2(c), 2(d), 2(d), 2(e), 2(f), 2(g) or 2(h); and the second gRNA molecule is the gRNA molecule of any of 2(a), 2(i), 2(j), 2(k) or 2(q); and the third gRNA molecule is the gRNA molecule of any of 15(a), 15(b), 15(c), 15(d), or 15(e). In other embodiments, the first gRNA molecule is the gRNA molecule of any of 2(b), 2(c), 2(d), 2(d), 2(e), 2(f), 2(g) or 2(h); and the second gRNA molecule is the gRNA molecule of any of 2(l), 2(m), 2(n), or 2(o); and the third gRNA molecule is the gRNA molecule of any of 15(a), 15(b), 15(c), 15(d), or 15(e). In other embodiments, the first gRNA molecule is the gRNA molecule of any of 2(b), 2(c), 2(d), 2(d), 2(e), 2(f), 2(g) or 2(h); and the second gRNA molecule is the gRNA molecule of any of 2(l), 2(m), 2(n), or 2(o). In other embodiments, the first gRNA molecule is the gRNA molecule of any of 2(b), 2(c), 2(d), 2(d), 2(e), 2(f), 2(g) or 2(h); and the second gRNA molecule is the gRNA molecule of any of 2(a), 2(i), 2(j), or 2(k). In other embodiments, the first gRNA molecule is the gRNA molecule of any of 2(b), 2(c), 2(d), 2(d), 2(e), 2(f), 2(g) or 2(h); and the second gRNA molecule is the gRNA molecule of any of 15(a), 15(b), 15(c), 15(d), or 15(e). In other embodiments, first gRNA molecule is the gRNA molecule of any of 15(a), 15(b), 15(c), 15(d), or 7(e); and the second gRNA molecule is the gRNA molecule of any of 15(a), 15(b), 15(c), 15(d), or 15(e). In embodiments of any of the aforementioned embodiments, a third gRNA is present, and the third gRNA molecule is a gRNA molecule of any of 15(a), 15(b), 15(c), 15(d), or 15(e). In embodiments, the composition consists of two gRNA molecules of any of the aforementioned gRNA molecule aspects and embodiments. In embodiments, the composition consists of three gRNA molecules of any of the aforementioned gRNA molecule aspects and embodiments. In embodiments, the composition consists of a first gRNA molecule of any of the aforementioned aspects and embodiments, wherein the targeting domain of said first gRNA molecule is a targeting domain of any of 2(a), 2(i), 2(j), or 2(k); and a second gRNA molecule of any of the aforementioned gRNA molecule aspects and embodiments, wherein the targeting domain of said second gRNA molecule is a targeting domain of any of 2(b), 2(c), 2(d), 2(f), 2(g), 2(h), or 2(i).

[0105] In embodiments, the composition includes two gRNA molecules, and the targeting domain of said first gRNA molecule includes, for example, consists of, SEQ ID NO: 5519, SEQ ID NO: 5497, SEQ ID NO: 5499, SEQ ID NO: 5498, SEQ ID NO: 5503, SEQ ID NO: 5496, SEQ ID NO: 5507, SEQ ID NO: 5515, SEQ ID NO: 5493, SEQ ID NO: 5506, SEQ ID NO: 5509, SEQ ID NO: 5517, SEQ ID NO: 5521, SEQ ID NO: 5520, SEQ ID NO: 5500, SEQ ID NO: 5494, SEQ ID NO: 5508, SEQ ID NO: 5514, or SEQ ID NO: 5492; and the targeting domain of said second gRNA molecule includes, for example, consists of, SEQ ID NO: 5569, SEQ ID NO: 5585, SEQ ID NO: 5587, SEQ ID NO: 5592, SEQ ID NO: 5601, SEQ ID NO: 5589, SEQ ID NO: 5600, SEQ ID NO: 5594, SEQ ID NO: 5571, SEQ ID NO: 5593, SEQ ID NO: 5574, SEQ ID NO: 5598, SEQ ID NO: 5586, SEQ ID NO: 5599, SEQ ID NO: 5591, SEQ ID NO: 5610, SEQ ID NO: 5608, SEQ ID NO: 5617, SEQ ID NO: 5619, or SEQ ID NO: 5620.

[0106] In embodiments, the composition includes two gRNA molecules, and the targeting domain of said first gRNA molecule includes, for example, consists of, SEQ ID NO: 5496, SEQ ID NO: 5498, or SEQ ID NO: 5509; and the targeting domain of said second gRNA molecule includes, for example, consists of, SEQ ID NO: 5569, SEQ ID NO: 5586, SEQ ID NO: 5587, SEQ ID NO: 5592, SEQ ID NO: 5599, or SEQ ID NO: 5600.

[0107] In embodiments, the composition includes two gRNA molecules, and the targeting domain of said first gRNA molecule includes, for example, consists of, SEQ ID NO: 5496, SEQ ID NO: 5498, or SEQ ID NO: 5509; and the targeting domain of said second gRNA molecule includes, for example, consists of, SEQ ID NO: 5569.

[0108] In embodiments, the composition includes two gRNA molecules, and the targeting domain of said first gRNA molecule includes, for example, consists of, SEQ ID NO: 5496, SEQ ID NO: 5498, or SEQ ID NO: 5509; and the targeting domain of said second gRNA molecule includes, for example, consists of, SEQ ID NO: 10729, SEQ ID NO: 10719, SEQ ID NO: 10764, SEQ ID NO: 10789, SEQ ID NO: 10701, SEQ ID NO: 10700, or SEQ ID NO: 10722.

[0109] In embodiments, including in any of the aforementioned aspects and embodiments, the composition further includes a third gRNA molecule described herein, for example, in any of the aforementioned gRNA molecule aspects and embodiments, wherein the targeting domain of said third gRNA molecule is a targeting domain of any of 2(n) or 2(q). In embodiments, the targeting domain of said third gRNA molecule includes, for example, consists of, SEQ ID NO: 7771, SEQ ID NO: 7769, SEQ ID NO: 7773, SEQ ID NO: 7726, SEQ ID NO: 7758, SEQ ID NO: 7739, SEQ ID NO: 7779, SEQ ID NO: 7770, SEQ ID NO: 7749, SEQ ID NO: 7754, SEQ ID NO: 7745, SEQ ID NO: 7785, SEQ ID NO: 7731, SEQ ID NO: 7772, SEQ ID NO: 7743, or SEQ ID NO: 7750; for example, includes (for example consists of) SEQ ID NO: 7769, SEQ ID NO: 7771, SEQ ID NO: 7739, or SEQ ID NO: 7785.

[0110] In embodiments, including in any of the aforementioned aspects and embodiments, the composition further includes a fourth gRNA molecule described herein, for example, in any of the aforementioned gRNA molecule aspects and embodiments, wherein the targeting domain of said fourth gRNA molecule is complementary to a target sequence of a target of an NK inhibitory molecule, for example, LILRB1. In embodiments, the targeting domain of said fourth gRNA molecule includes, e.g., consists of:
[0111] a) any one of SEQ ID NO: 10090 to SEQ ID NO: 10673;
[0112] b) 17, 18, 19, 20, 21, 22, 23, or 24 consecutive nucleotides, preferably 20 consecutive nucleotides, of any one of SEQ ID NO: 10090 to SEQ ID NO: 10673.
[0113] c) The 5′ 17, 18, 19, 20, 21, 22, 23 or 24 nucleotides, preferably 20 nucleotides, of any one of SEQ ID NO: 10090 to SEQ ID NO: 10673; or
[0114] d) The 3′ 17, 18, 19, 20, 21, 22, 23 or 24 nucleotides, preferably 20 nucleotides, of any one of SEQ ID NO: 10090 to SEQ ID NO: 10673.

[0115] In embodiments of the composition (including in any of the aforementioned aspects and embodiments), the targeting domain of the first gRNA molecule (as described herein), the targeting domain of the second gRNA molecule (as described herein), and, if present, the targeting domain of the third gRNA molecule (as described herein), include, e.g., consist of, the sequences of any of:
[0116] a) Combination A1 to combination A72 of Table 33;
[0117] b) Combination B1 to combination B84 of Table 34;
[0118] c) Combination C1 to combination C42 of Table 35;
[0119] d) Combination D1 to combination D36 of Table 36;
[0120] e) Combination E1 to combination E30 of Table 37; or
[0121] f) Combination F1 to combination F60 of Table 38.

[0122] In any of the aforementioned aspects and embodiments, each of said gRNA molecules is in a ribonuclear protein complex (RNP) with a Cas9 molecule described herein.

[0123] In embodiments, the gRNA molecule or composition is formulated in a medium suitable for electroporation.

[0124] In embodiments wherein each of said gRNA molecules is in a RNP with a Cas9 molecule described herein, each of said RNP complexes is at a concentration of less than about 10 uM, e.g., less than about 3 uM, e.g., less than about 1 uM, e.g., less than about 0.5 uM, e.g., less than about 0.3 uM, e.g., less than about 0.1 uM.

[0125] In embodiments, the composition further includes a cell, e.g., a population of cells, e.g., an immune effector cell, e.g., a CAR-expressing immune effector cell, e.g., described herein.

[0126] In another aspect, the invention provides a nucleic acid that encodes a gRNA molecule of any of the previous gRNA molecule aspects or embodiments, or a (for example, all) component(s) of a composition of any of the aforementioned composition aspects and embodiments. In embodiments, the nucleic acid includes a promoter operably linked to the sequence that encodes the gRNA molecule. In embodiments, the promoter is a promoter recognized by an RNA polymerase II or RNA polymerase III. In other embodiments, the promoter is a U6 promoter or an HI promoter. In embodiments, the nucleic acid further encodes a Cas9 molecule. In embodiments, the nucleic acid includes a promoter operably linked to the sequence that encodes a Cas9 molecule, for example, an EF-1 promoter, a CMV IE gene promoter, an EF-1α promoter, an ubiquitin C promoter, or a phosphoglycerate kinase (PGK) promoter.

[0127] In another aspect, the invention provides a vector that includes the nucleic acid of any of any of the aforementioned nucleic acid aspects and embodiments. In embodiments, the vector is selected from the group consisting of a lentiviral vector, an adenoviral vector, an adeno-associated viral (AAV) vector, a herpes simplex virus (HSV) vector, a plasmid, a minicircle, a nanoplasmid, and an RNA vector.

[0128] In another aspect, the invention provides a composition that includes a gRNA molecule of any the aforementioned gRNA molecule aspects and embodiments, and nucleic acid encoding a Cas9 molecule, for example, as described herein.

[0129] In another aspect, the invention provides a composition that includes a nucleic acid encoding a gRNA molecule of any the aforementioned gRNA molecule aspects and embodiments, and a Cas9 molecule, for example, as described herein.

[0130] In embodiments of any of the compositions of the invention, the composition further includes a template nucleic acid. In embodiments, the template nucleic acid includes a nucleotide that corresponds to a nucleotide of a target sequence of the gRNA molecule. In embodiments, the template nucleic acid includes nucleic acid encoding a chimeric antigen receptor (CAR), for example, as described herein. In embodiments, the CAR is (a) a CD19 CAR, e.g., as described in WO2012/079000 or WO2014/153270; or (b) a BCMA CAR, e.g., as described herein, e.g., a BCMA CAR including SEQ ID NO: 8559. In embodiments, the template nucleic acid includes nucleic acid encoding an NK inhibitory molecule, for example, as described herein.

[0131] In another aspect, the invention provides a method of altering e.g., altering the structure, e.g., sequence of, a target sequence of a cell, including contacting said cell with a) a gRNA molecule, e.g., more than one gRNA molecule, of any of the previous gRNA molecule aspects and embodiments, and a Cas9 molecule, for example, as described herein; b) a gRNA molecule, e.g., more than one gRNA molecule, of any of the previous gRNA molecule aspects and embodiments and nucleic acid encoding a Cas9 molecule, for example, as described herein; c) nucleic acid encoding a gRNA molecule, e.g., more than one gRNA molecule, of any of the previous gRNA molecule aspects and embodiments and a Cas9 molecule, for example, as described herein; d) nucleic acid encoding a gRNA molecule, e.g., more than one gRNA molecule, of any of the previous gRNA molecule aspects and embodiments and nucleic acid encoding a Cas9 molecule, for example, as described herein; e) any of a) to d), above, and a template nucleic acid; f) any of a) to d) above, and nucleic acid including sequence encoding a template nucleic acid; g) a composition of any of the previous composition aspects and embodiments; or h) a vector of any of the previous vector aspects and embodiments. In embodiments, the gRNA molecule or nucleic acid encoding the gRNA molecule, and the Cas9 molecule or nucleic acid encoding the Cas9 molecule, are formulated in a single composition. In other embodiments, the gRNA molecule or nucleic acid encoding the gRNA molecule, and the Cas9 molecule or nucleic acid encoding the Cas9 molecule, are formulated in more than one composition. In embodiments, the more than one composition are delivered, for example, delivered to a cell described herein, simultaneously or sequentially. In embodiments, the cell is an animal cell, for example, a mammalian, primate, or human cell. In embodiments, the cell is an immune effector cell (e.g., a population of immune effector cells), for example, a T cell or NK cell, for example, T cell, for example, a CD4+ T cell, a CD8+ T cell, or a combination thereof. In embodiments, the cell has been, or will be, engineered to express a chimeric antigen receptor (CAR), for example, as described herein. In embodiments, the cell includes, or will include a chimeric antigen receptor (CAR), for example, as described herein. In embodiments, the cell includes, or will include nucleic acid encoding a chimeric antigen receptor (CAR), for example, as described herein. In embodiments, the CAR is (a) a CD19 CAR; or (b) a BCMA CAR. In embodiments, the CAR is a CD19 CAR including an antigen binding domain including any one of SEQ ID NO: 7883 to SEQ ID NO: 7898. In embodiments, the CAR is a CD19 CAR and includes any one of SEQ ID NO: 7908 to SEQ ID NO: 7920. In embodiments, the CAR is a BCMA CAR including an antigen binding domain including any one of SEQ ID NO: 7939 to SEQ ID NO: 8112. In embodiments, the CAR is a BCMA CAR and includes any one of SEQ ID NO: 8549 to SEQ ID NO: 8621, e.g., includes SEQ ID NO: 8559. In embodiments the cell is allogeneic with respect to a patient to be administered said cell. In embodiments, the cell is isolated from a healthy human donor. In embodiments the cell is autologous with respect to a patient to be administered said cell.

[0132] In another aspect, the invention provides a cell, altered by a method of any of the aforementioned method aspects and embodiments, for example, altered by a method described herein. In another aspect, the invention provides a cell that includes a first gRNA molecule of any of the aforementioned gRNA molecule aspects and embodiments, or a composition of any of the aforementioned composition aspects and embodiments, a nucleic acid of any of the aforementioned nucleic acid aspects and embodiments, or a vector of any of the aforementioned vector aspects and embodiments. In embodiments, the gRNA molecule, composition, nucleic acid or vector is introduced into said cell ex vivo. In other embodiments, the gRNA molecule, composition, nucleic acid or vector is introduced into said cell in vivo. In embodiments, the cell is an animal cell, for example, a mammalian, primate, or human cell. In embodiments, the cell is an immune effector cell (e.g., a population of immune effector cells), for example, a T cell or NK cell, for example, T cell, for example, a CD4+ T cell, a CD8+ T cell, or a combination thereof. In embodiments, the cell has been, or will be, engineered to express a chimeric antigen receptor (CAR), for example, as described herein. In embodiments, the cell includes, or will include a chimeric antigen receptor (CAR), for example, as described herein. In embodiments, the cell includes, or will include nucleic acid encoding a chimeric antigen receptor (CAR), for example, as described herein. In embodiments, the CAR is (a) a CD19 CAR; or (b) a BCMA CAR. In embodiments, the CAR is a CD19 CAR including an antigen binding domain including any one of SEQ ID NO: 7883 to SEQ ID NO: 7898. In embodiments, the CAR is a CD19 CAR and includes any one of SEQ ID NO: 7908 to SEQ ID NO: 7920. In embodiments, the CAR is a BCMA CAR including an antigen binding domain including any one of SEQ ID NO: 7939 to SEQ ID NO: 8112. In embodiments, the CAR is a BCMA CAR and includes any one of SEQ ID NO: 8549 to SEQ ID NO: 8621, e.g., includes SEQ ID NO: 8559. In embodiments the cell is allogeneic with respect to a patient to be administered said cell. In embodiments, the cell is isolated from a healthy human donor. In embodiments the cell is autologous with respect to a patient to be administered said cell. In embodiments, the cell includes, has included, or will include a second gRNA molecule of any of claims 1-60, or a nucleic acid encoding the second gRNA molecule of any of the aforementioned gRNA molecule aspects and embodiments, wherein the first gRNA molecule and second gRNA molecule include nonidentical targeting domains. In embodiments, the first gRNA molecule includes a targeting domain complementary with a target sequence of an allogeneic T-cell target (e.g., a targeting domain described in Tables 1, 3, 4 or 5), and the second gRNA molecule includes a targeting domain complementary with a target sequence of an inhibitory molecule or downstream effector of signaling through an inhibitory molecule (e.g., includes a targeting domain described in Table 2 or Table 6). In embodiments, the inhibitory molecule or downstream effector of signaling through an inhibitory molecule is CD274, HAVCR2, LAG3, PDCD1, PD-L2, CTLA4, CEACAM (e.g., CEACAM-1, CEACAM-3 and/or CEACAM-5), VISTA, BTLA, TIGIT, LAIR1, CD160, 2B4, CD80, CD86, B7-H3 (CD113), B7-H4 (VTCN1), HVEM (TNFRSF14 or CD107), KIR, A2aR, MHC class I, MHC class II, GAL9, adenosine, and TGF beta, or PTPN11. In embodiments, the first gRNA molecule includes a targeting domain complementary with a target sequence of TRAC, TRBC1, TRBC2, CD247, CD3D, CD3 E, or CD3G, and the second gRNA molecule includes a targeting domain complementary with a target sequence of NLRC5, e.g., includes a targeting domain including (e.g., consisting of) any one of SEQ ID NO: 8622 to SEQ ID NO: 10089. In embodiments, the first gRNA molecule includes a targeting domain complementary with a target sequence of TRAC, TRBC1, TRBC2, CD247, CD3D, CD3 E, or CD3G, and the second gRNA molecule includes a targeting domain complementary with a target sequence of B2M, HLA-A, HLA-B or HLA-C. In embodiments, the cell further includes, has included, or will include a third gRNA molecule of any of the aforementioned gRNA molecule aspects and embodiments, or a nucleic acid encoding the third gRNA molecule of any of the aforementioned gRNA molecule aspects and embodiments, wherein the first gRNA molecule, the second gRNA molecule and the third gRNA molecule include nonidentical targeting domains. In embodiments, the third gRNA molecule includes a targeting domain complementary with a target sequence of CIITA, RFXANK, RFX5, or RFXAP, e.g., CIITA, e.g., includes a targeting domain including, e.g., consisting of, any one of SEQ ID NO: 7717 to SEQ ID NO: 7804, e.g., includes a targeting domain including, e.g., consisting of, any one of SEQ ID NO: 7769, SEQ ID NO: 7771, or SEQ ID NO: 7785. In embodiments, the cell includes three gRNA molecules, and the first gRNA molecule includes a targeting domain complementary with a target sequence of TRAC; the second gRNA molecule includes a targeting domain complementary with a target sequence of B2M; and the third gRNA molecule includes a targeting domain complementary with a target sequence of CIITA. In embodiments, the cell includes three gRNA molecules, and the first gRNA molecule includes a targeting domain complementary with a target sequence of TRAC; the second gRNA molecule includes a targeting domain complementary with a target sequence of NLRC5; and the third gRNA molecule includes a targeting domain complementary with a target sequence of CIITA. In embodiments, the cell includes two gRNA molecules, and the first gRNA molecule includes a targeting domain complementary with a target sequence of TRAC, TRBC1, TRBC2, CD247, CD3D, CD3 E, or CD3G, and the second gRNA molecule includes a targeting domain complementary with a target sequence of NR3C1, DCK, CD52 or FKBP1A.

[0133] In embodiments of the cell which includes a gRNA molecule (e.g., more than one gRNA molecule described herein):
[0134] (1) the first gRNA molecule includes a targeting domain selected from the group consisting of SEQ ID NO: 5528 to SEQ ID NO: 5623 or SEQ ID NO: 5816 to SEQ ID NO: 5965, and the second guide RNA molecule includes a targeting domain selected from the group consisting of SEQ ID NO: 1 to SEQ ID NO: 83 and SEQ ID NO: 5492 to SEQ ID NO: 5527;
[0135] (2) the first gRNA molecule includes a targeting domain selected from the group consisting of SEQ ID NO: 5528 to SEQ ID NO: 5623 or SEQ ID NO: 5816 to SEQ ID NO: 5965, and the second guide RNA molecule includes a targeting domain selected from the group consisting of SEQ ID NO: 969 to SEQ ID NO: 1345;
[0136] (3) the first gRNA molecule includes a targeting domain selected from the group consisting of SEQ ID NO: 5528 to SEQ ID NO: 5623 or SEQ ID NO: 5816 to SEQ ID NO: 5965, and the second guide RNA molecule includes a targeting domain selected from the group consisting of SEQ ID NO: 1346 to SEQ ID NO: 1698;
[0137] (4) the first gRNA molecule includes a targeting domain selected from the group consisting of SEQ ID NO: 5528 to SEQ ID NO: 5623 or SEQ ID NO: 5816 to SEQ ID NO: 5965, and the second guide RNA molecule includes a targeting domain selected from the group consisting of SEQ ID NO: 1699 to SEQ ID NO: 2068;
[0138] (5) the first gRNA molecule includes a targeting domain selected from the group consisting of SEQ ID NO: 5528 to SEQ ID NO: 5623 or SEQ ID NO: 5816 to SEQ ID NO: 5965, and the second guide RNA molecule includes a targeting domain selected from the group consisting of SEQ ID NO: 2069 to SEQ ID NO: 2941;
[0139] (6) the first gRNA molecule includes a targeting domain selected from the group consisting of SEQ ID NO: 5528 to SEQ ID NO: 5623 or SEQ ID NO: 5816 to SEQ ID NO: 5965, and the second guide RNA molecule includes a targeting domain selected from the group consisting of SEQ ID NO: 5278 to SEQ ID NO: 5491;
[0140] (7) the first gRNA molecule includes a targeting domain selected from the group consisting of SEQ ID NO: 5528 to SEQ ID NO: 5623 or SEQ ID NO: 5816 to SEQ ID NO: 5965, and the second guide RNA molecule includes a targeting domain selected from the group consisting of SEQ ID NO: 6227 to SEQ ID NO: 6324;
[0141] (8) the first gRNA molecule includes a targeting domain selected from the group consisting of SEQ ID NO: 5528 to SEQ ID NO: 5623 or SEQ ID NO: 5816 to SEQ ID NO: 5965, and the second guide RNA molecule includes a targeting domain selected from the group consisting of SEQ ID NO: 6325 to SEQ ID NO: 6583;
[0142] (9) the first gRNA molecule includes a targeting domain selected from the group consisting of SEQ ID NO: 5624 to SEQ ID NO: 5643 or SEQ ID NO: 5966 to SEQ ID NO: 6097, and the second guide RNA molecule includes a targeting domain selected from the group consisting of SEQ ID NO: 1 to SEQ ID NO: 83 and SEQ ID NO: 5492 to SEQ ID NO: 5527;
[0143] (10) the first gRNA molecule includes a targeting domain selected from the group consisting of SEQ ID NO: 5624 to SEQ ID NO: 5643 or SEQ ID NO: 5966 to SEQ ID NO: 6097, and the second guide RNA molecule includes a targeting domain selected from the group consisting of SEQ ID NO: 969 to SEQ ID NO: 1345;
[0144] (11) the first gRNA molecule includes a targeting domain selected from the group consisting of SEQ ID NO: 5624 to SEQ ID NO: 5643 or SEQ ID NO: 5966 to SEQ ID NO: 6097, and the second guide RNA molecule includes a targeting domain selected from the group consisting of SEQ ID NO: 1346 to SEQ ID NO: 1698;
[0145] (12) the first gRNA molecule includes a targeting domain selected from the group consisting of SEQ ID NO: 5624 to SEQ ID NO: 5643 or SEQ ID NO: 5966 to SEQ ID NO: 6097, and the second guide RNA molecule includes a targeting domain selected from the group consisting of SEQ ID NO: 1699 to SEQ ID NO: 2068;
[0146] (13) the first gRNA molecule includes a targeting domain selected from the group consisting of SEQ ID NO: 5624 to SEQ ID NO: 5643 or SEQ ID NO: 5966 to SEQ ID NO: 6097, and the second guide RNA molecule includes a targeting domain selected from the group consisting of SEQ ID NO: 2069 to SEQ ID NO: 2941;
[0147] (14) the first gRNA molecule includes a targeting domain selected from the group consisting of SEQ ID NO: 5624 to SEQ ID NO: 5643 or SEQ ID NO: 5966 to SEQ ID NO: 6097, and the second guide RNA molecule includes a targeting domain selected from the group consisting of SEQ ID NO: 5278 to SEQ ID NO: 5491;
[0148] (15) the first gRNA molecule includes a targeting domain selected from the group consisting of SEQ ID NO: 5624 to SEQ ID NO: 5643 or SEQ ID NO: 5966 to SEQ ID NO: 6097, and the second guide RNA molecule includes a targeting domain selected from the group consisting of SEQ ID NO: 6227 to SEQ ID NO: 6324;
[0149] (16) the first gRNA molecule includes a targeting domain selected from the group consisting of SEQ ID NO: 5624 to SEQ ID NO: 5643 or SEQ ID NO: 5966 to SEQ ID NO: 6097, and the second guide RNA molecule includes a targeting domain selected from the group consisting of SEQ ID NO: 6325 to SEQ ID NO: 6583;
[0150] (17) the first gRNA molecule includes a targeting domain selected from the group consisting of SEQ ID NO: 5644 to SEQ ID NO: 5719 or SEQ ID NO: 6098 to SEQ ID NO: 6226, and the second guide RNA molecule includes a targeting domain selected from the group consisting of SEQ ID NO: 1 to SEQ ID NO: 83 and SEQ ID NO: 5492 to SEQ ID NO: 5527;
[0151] (18) the first gRNA molecule includes a targeting domain selected from the group consisting of SEQ ID NO: 5644 to SEQ ID NO: 5719 or SEQ ID NO: 6098 to SEQ ID NO: 6226, and the second guide RNA molecule includes a targeting domain selected from the group consisting of SEQ ID NO: 969 to SEQ ID NO: 1345;
[0152] (19) the first gRNA molecule includes a targeting domain selected from the group consisting of SEQ ID NO: 5644 to SEQ ID NO: 5719 or SEQ ID NO: 6098 to SEQ ID NO: 6226, and the second guide RNA molecule includes a targeting domain selected from the group consisting of SEQ ID NO: 1346 to SEQ ID NO: 1698;
[0153] (20) the first gRNA molecule includes a targeting domain selected from the group consisting of SEQ ID NO: 5644 to SEQ ID NO: 5719 or SEQ ID NO: 6098 to SEQ ID NO: 6226, and the second guide RNA molecule includes a targeting domain selected from the group consisting of SEQ ID NO: 1699 to SEQ ID NO: 2068;
[0154] (21) the first gRNA molecule includes a targeting domain selected from the group consisting of SEQ ID NO: 5644 to SEQ ID NO: 5719 or SEQ ID NO: 6098 to SEQ ID NO: 6226, and the second guide RNA molecule includes a targeting domain selected from the group consisting of SEQ ID NO: 2069 to SEQ ID NO: 2941;
[0155] (22) the first gRNA molecule includes a targeting domain selected from the group consisting of SEQ ID NO: 5644 to SEQ ID NO: 5719 or SEQ ID NO: 6098 to SEQ ID NO: 6226, and the second guide RNA molecule includes a targeting domain selected from the group consisting of SEQ ID NO: 5278 to SEQ ID NO: 5491;
[0156] (23) the first gRNA molecule includes a targeting domain selected from the group consisting of SEQ ID NO: 5644 to SEQ ID NO: 5719 or SEQ ID NO: 6098 to SEQ ID NO: 6226, and the second guide RNA molecule includes a targeting domain selected from the group consisting of SEQ ID NO: 6227 to SEQ ID NO: 6324;
[0157] (24) the first gRNA molecule includes a targeting domain selected from the group consisting of SEQ ID NO: 5644 to SEQ ID NO: 5719 or SEQ ID NO: 6098 to SEQ ID NO: 6226, and the second guide RNA molecule includes a targeting domain selected from the group consisting of SEQ ID NO: 6325 to SEQ ID NO: 6583;
[0158] (25) the first gRNA molecule includes a targeting domain selected from the group consisting of SEQ ID NO: 84 to SEQ ID NO: 392, and the second guide RNA molecule includes a targeting domain selected from the group consisting of SEQ ID NO: 1 to SEQ ID NO: 83 and SEQ ID NO: 5492 to SEQ ID NO: 5527;
[0159] (26) the first gRNA molecule includes a targeting domain selected from the group consisting of SEQ ID NO: 84 to SEQ ID NO: 392, and the second guide RNA molecule includes a targeting domain selected from the group consisting of SEQ ID NO: 969 to SEQ ID NO: 1345;
[0160] (27) the first gRNA molecule includes a targeting domain selected from the group consisting of SEQ ID NO: 84 to SEQ ID NO: 392, and the second guide RNA molecule includes a targeting domain selected from the group consisting of SEQ ID NO: 1346 to SEQ ID NO: 1698;
[0161] (28) the first gRNA molecule includes a targeting domain selected from the group consisting of SEQ ID NO: 84 to SEQ ID NO: 392, and the second guide RNA molecule includes a targeting domain selected from the group consisting of SEQ ID NO: 1699 to SEQ ID NO: 2068;
[0162] (29) the first gRNA molecule includes a targeting domain selected from the group consisting of SEQ ID NO: 84 to SEQ ID NO: 392, and the second guide RNA molecule includes a targeting domain selected from the group consisting of SEQ ID NO: 2069 to SEQ ID NO: 2941;
[0163] (30) the first gRNA molecule includes a targeting domain selected from the group consisting of SEQ ID NO: 84 to SEQ ID NO: 392, and the second guide RNA molecule includes a targeting domain selected from the group consisting of SEQ ID NO: 5278 to SEQ ID NO: 5491;
[0164] (31) the first gRNA molecule includes a targeting domain selected from the group consisting of SEQ ID NO: 84 to SEQ ID NO: 392, and the second guide RNA molecule includes a targeting domain selected from the group consisting of SEQ ID NO: 6227 to SEQ ID NO: 6324;
[0165] (32) the first gRNA molecule includes a targeting domain selected from the group consisting of SEQ ID NO: 84 to SEQ ID NO: 392, and the second guide RNA molecule includes a targeting domain selected from the group consisting of SEQ ID NO: 6325 to SEQ ID NO: 6583;
[0166] (33) the first gRNA molecule includes a targeting domain selected from the group consisting of SEQ ID NO: 393 to SEQ ID NO: 532, and the second guide RNA molecule includes a targeting domain selected from the group consisting of SEQ ID NO: 1 to SEQ ID NO: 83 and SEQ ID NO: 5492 to SEQ ID NO: 5527;
[0167] (34) the first gRNA molecule includes a targeting domain selected from the group consisting of SEQ ID NO: 393 to SEQ ID NO: 532, and the second guide RNA molecule includes a targeting domain selected from the group consisting of SEQ ID NO: 969 to SEQ ID NO: 1345;
[0168] (35) the first gRNA molecule includes a targeting domain selected from the group consisting of SEQ ID NO: 393 to SEQ ID NO: 532, and the second guide RNA molecule includes a targeting domain selected from the group consisting of SEQ ID NO: 1346 to SEQ ID NO: 1698;
[0169] (36) the first gRNA molecule includes a targeting domain selected from the group consisting of SEQ ID NO: 393 to SEQ ID NO: 532, and the second guide RNA molecule includes a targeting domain selected from the group consisting of SEQ ID NO: 1699 to SEQ ID NO: 2068;
[0170] (37) the first gRNA molecule includes a targeting domain selected from the group consisting of SEQ ID NO: 393 to SEQ ID NO: 532, and the second guide RNA molecule includes a targeting domain selected from the group consisting of SEQ ID NO: 2069 to SEQ ID NO: 2941;
[0171] (38) the first gRNA molecule includes a targeting domain selected from the group consisting of SEQ ID NO: 393 to SEQ ID NO: 532, and the second guide RNA molecule includes a targeting domain selected from the group consisting of SEQ ID NO: 5278 to SEQ ID NO: 5491;
[0172] (39) the first gRNA molecule includes a targeting domain selected from the group consisting of SEQ ID NO: 393 to SEQ ID NO: 532, and the second guide RNA molecule includes a targeting domain selected from the group consisting of SEQ ID NO: 6227 to SEQ ID NO: 6324;
[0173] (40) the first gRNA molecule includes a targeting domain selected from the group consisting of SEQ ID NO: 393 to SEQ ID NO: 532, and the second guide RNA molecule includes a targeting domain selected from the group consisting of SEQ ID NO: 6325 to SEQ ID NO: 6583;
[0174] (41) the first gRNA molecule includes a targeting domain selected from the group consisting of SEQ ID NO: 533 to SEQ ID NO: 839, and the second guide RNA molecule includes a targeting domain selected from the group consisting of SEQ ID NO: 1 to SEQ ID NO: 83 and SEQ ID NO: 5492 to SEQ ID NO: 5527;
[0175] (42) the first gRNA molecule includes a targeting domain selected from the group consisting of SEQ ID NO: 533 to SEQ ID NO: 839, and the second guide RNA molecule includes a targeting domain selected from the group consisting of SEQ ID NO: 969 to SEQ ID NO: 1345;
[0176] (43) the first gRNA molecule includes a targeting domain selected from the group consisting of SEQ ID NO: 533 to SEQ ID NO: 839, and the second guide RNA molecule includes a targeting domain selected from the group consisting of SEQ ID NO: 1346 to SEQ ID NO: 1698;
[0177] (44) the first gRNA molecule includes a targeting domain selected from the group consisting of SEQ ID NO: 533 to SEQ ID NO: 839, and the second guide RNA molecule includes a targeting domain selected from the group consisting of SEQ ID NO: 1699 to SEQ ID NO: 2068;
[0178] (45) the first gRNA molecule includes a targeting domain selected from the group consisting of SEQ ID NO: 533 to SEQ ID NO: 839, and the second guide RNA molecule includes a targeting domain selected from the group consisting of SEQ ID NO: 2069 to SEQ ID NO: 2941;
[0179] (46) the first gRNA molecule includes a targeting domain selected from the group consisting of SEQ ID NO: 533 to SEQ ID NO: 839, and the second guide RNA molecule includes a targeting domain selected from the group consisting of SEQ ID NO: 5278 to SEQ ID NO: 5491;
[0180] (47) the first gRNA molecule includes a targeting domain selected from the group consisting of SEQ ID NO: 533 to SEQ ID NO: 839, and the second guide RNA molecule includes a targeting domain selected from the group consisting of SEQ ID NO: 6227 to SEQ ID NO: 6324;
[0181] (48) the first gRNA molecule includes a targeting domain selected from the group consisting of SEQ ID NO: 533 to SEQ ID NO: 839, and the second guide RNA molecule includes a targeting domain selected from the group consisting of SEQ ID NO: 6325 to SEQ ID NO: 6583;
[0182] (49) the first gRNA molecule includes a targeting domain selected from the group consisting of SEQ ID NO: 840 to SEQ ID NO: 968, and the second guide RNA molecule includes a targeting domain selected from the group consisting of SEQ ID NO: 1 to SEQ ID NO: 83 and SEQ ID NO: 5492 to SEQ ID NO: 5527;
[0183] (50) the first gRNA molecule includes a targeting domain selected from the group consisting of SEQ ID NO: 840 to SEQ ID NO: 968, and the second guide RNA molecule includes a targeting domain selected from the group consisting of SEQ ID NO: 969 to SEQ ID NO: 1345;
[0184] (51) the first gRNA molecule includes a targeting domain selected from the group consisting of SEQ ID NO: 840 to SEQ ID NO: 968, and the second guide RNA molecule includes a targeting domain selected from the group consisting of SEQ ID NO: 1346 to SEQ ID NO: 1698;
[0185] (52) the first gRNA molecule includes a targeting domain selected from the group consisting of SEQ ID NO: 840 to SEQ ID NO: 968, and the second guide RNA molecule includes a targeting domain selected from the group consisting of SEQ ID NO: 1699 to SEQ ID NO: 2068;
[0186] (53) the first gRNA molecule includes a targeting domain selected from the group consisting of SEQ ID NO: 840 to SEQ ID NO: 968, and the second guide RNA molecule includes a targeting domain selected from the group consisting of SEQ ID NO: 2069 to SEQ ID NO: 2941;
[0187] (54) the first gRNA molecule includes a targeting domain selected from the group consisting of SEQ ID NO: 840 to SEQ ID NO: 968, and the second guide RNA molecule includes a targeting domain selected from the group consisting of SEQ ID NO: 5278 to SEQ ID NO: 5491;
[0188] (55) the first gRNA molecule includes a targeting domain selected from the group consisting of SEQ ID NO: 840 to SEQ ID NO: 968, and the second guide RNA molecule includes a targeting domain selected from the group consisting of SEQ ID NO: 6227 to SEQ ID NO: 6324; or
[0189] (56) the first gRNA molecule includes a targeting domain selected from the group consisting of SEQ ID NO: 840 to SEQ ID NO: 968, and the second guide RNA molecule includes a targeting domain selected from the group consisting of SEQ ID NO: 6325 to SEQ ID NO: 6583.

[0190] In embodiments, including in any of the aforementioned cell aspects and embodiments, the cell further includes a third gRNA molecule including a targeting domain complementary with a target sequence of an inhibitory molecule or downstream effector of signaling through an inhibitory molecule, wherein the inhibitory molecule or downstream effector of signaling through an inhibitory molecule is CD274, HAVCR2, LAG3, PDCD1, PD-L2, CTLA4, CEACAM (e.g., CEACAM-1, CEACAM-3 and/or CEACAM-5), VISTA, BTLA, TIGIT, LAIR1, CD160, 2B4, CD80, CD86, B7-H3 (CD113), B7-H4 (VTCN1), HVEM (TNFRSF14 or CD107), KIR, A2aR, MHC class I, MHC class II, GAL9, adenosine, and TGF beta, or PTPN11, for example, the third gRNA molecule is comprises a targeting domain of any of 15(a) to 15(e).

[0191] In embodiments of the cell which includes a gRNA molecule (e.g., more than one gRNA molecule described herein):
[0192] (1) the first gRNA molecule includes a targeting domain selected from the group consisting of SEQ ID NO: 5528 to SEQ ID NO: 5623 or SEQ ID NO: 5816 to SEQ ID NO: 5965, and the second guide RNA molecule includes a targeting domain selected from the group consisting of SEQ ID NO: 2942 to SEQ ID NO: 3270;
[0193] (2) the first gRNA molecule includes a targeting domain selected from the group consisting of SEQ ID NO: 5528 to SEQ ID NO: 5623 or SEQ ID NO: 5816 to SEQ ID NO: 5965, and the second guide RNA molecule includes a targeting domain selected from the group consisting of SEQ ID NO: 3271 to SEQ ID NO: 3541;
[0194] (3) the first gRNA molecule includes a targeting domain selected from the group consisting of SEQ ID NO: 5528 to SEQ ID NO: 5623 or SEQ ID NO: 5816 to SEQ ID NO: 5965, and the second guide RNA molecule includes a targeting domain selected from the group consisting of SEQ ID NO: 3542 to SEQ ID NO: 4032;
[0195] (4) the first gRNA molecule includes a targeting domain selected from the group consisting of SEQ ID NO: 5528 to SEQ ID NO: 5623 or SEQ ID NO: 5816 to SEQ ID NO: 5965, and the second guide RNA molecule includes a targeting domain selected from the group consisting of SEQ ID NO: 4033 to SEQ ID NO: 4589 and SEQ ID NO: 5720 to SEQ ID NO: 5815;
[0196] (5) the first gRNA molecule includes a targeting domain selected from the group consisting of SEQ ID NO: 5528 to SEQ ID NO: 5623 or SEQ ID NO: 5816 to SEQ ID NO: 5965, and the second guide RNA molecule includes a targeting domain selected from the group consisting of SEQ ID NO: 4590 to SEQ ID NO: 5277;
[0197] (6) the first gRNA molecule includes a targeting domain selected from the group consisting of SEQ ID NO: 5624 to SEQ ID NO: 5643 or SEQ ID NO: 5966 to SEQ ID NO: 6097, and the second guide RNA molecule includes a targeting domain selected from the group consisting of SEQ ID NO: 2942 to SEQ ID NO: 3270;
[0198] (7) the first gRNA molecule includes a targeting domain selected from the group consisting of SEQ ID NO: 5624 to SEQ ID NO: 5643 or SEQ ID NO: 5966 to SEQ ID NO: 6097, and the second guide RNA molecule includes a targeting domain selected from the group consisting of SEQ ID NO: 3271 to SEQ ID NO: 3541;
[0199] (8) the first gRNA molecule includes a targeting domain selected from the group consisting of SEQ ID NO: 5624 to SEQ ID NO: 5643 or SEQ ID NO: 5966 to SEQ ID NO: 6097, and the second guide RNA molecule includes a targeting domain selected from the group consisting of SEQ ID NO: 3542 to SEQ ID NO: 4032;
[0200] (9) the first gRNA molecule includes a targeting domain selected from the group consisting of SEQ ID NO: 5624 to SEQ ID NO: 5643 or SEQ ID NO: 5966 to SEQ ID NO: 6097, and the second guide RNA molecule includes a targeting domain selected from the group consisting of SEQ ID NO: 4033 to SEQ ID NO: 4589 and SEQ ID NO: 5720 to SEQ ID NO: 5815;
[0201] (10) the first gRNA molecule includes a targeting domain selected from the group consisting of SEQ ID NO: 5624 to SEQ ID NO: 5643 or SEQ ID NO: 5966 to SEQ ID NO: 6097, and the second guide RNA molecule includes a targeting domain selected from the group consisting of SEQ ID NO: 4590 to SEQ ID NO: 5277;
[0202] (11) the first gRNA molecule includes a targeting domain selected from the group consisting of SEQ ID NO: 5644 to SEQ ID NO: 5719 or SEQ ID NO: 6098 to SEQ ID NO: 6226, and the second guide RNA molecule includes a targeting domain selected from the group consisting of SEQ ID NO: 2942 to SEQ ID NO: 3270;
[0203] (12) the first gRNA molecule includes a targeting domain selected from the group consisting of SEQ ID NO: 5644 to SEQ ID NO: 5719 or SEQ ID NO: 6098 to SEQ ID NO: 6226, and the second guide RNA molecule includes a targeting domain selected from the group consisting of SEQ ID NO: 3271 to SEQ ID NO: 3541;
[0204] (13) the first gRNA molecule includes a targeting domain selected from the group consisting of SEQ ID NO: 5644 to SEQ ID NO: 5719 or SEQ ID NO: 6098 to SEQ ID NO: 6226, and the second guide RNA molecule includes a targeting domain selected from the group consisting of SEQ ID NO: 3542 to SEQ ID NO: 4032;
[0205] (14) the first gRNA molecule includes a targeting domain selected from the group consisting of SEQ ID NO: 5644 to SEQ ID NO: 5719 or SEQ ID NO: 6098 to SEQ ID NO: 6226, and the second guide RNA molecule includes a targeting domain selected from the group consisting of SEQ ID NO: 4033 to SEQ ID NO: 4589 and SEQ ID NO: 5720 to SEQ ID NO: 5815;
[0206] (15) the first gRNA molecule includes a targeting domain selected from the group consisting of SEQ ID NO: 5644 to SEQ ID NO: 5719 or SEQ ID NO: 6098 to SEQ ID NO: 6226, and the second guide RNA molecule includes a targeting domain selected from the group consisting of SEQ ID NO: 4590 to SEQ ID NO: 5277;
[0207] (16) the first gRNA molecule includes a targeting domain selected from the group consisting of SEQ ID NO: 84 to SEQ ID NO: 392, and the second guide RNA molecule includes a targeting domain selected from the group consisting of SEQ ID NO: 2942 to SEQ ID NO: 3270;
[0208] (17) the first gRNA molecule includes a targeting domain selected from the group consisting of SEQ ID NO: 84 to SEQ ID NO: 392, and the second guide RNA molecule includes a targeting domain selected from the group consisting of SEQ ID NO: 3271 to SEQ ID NO: 3541;
[0209] (18) the first gRNA molecule includes a targeting domain selected from the group consisting of SEQ ID NO: 84 to SEQ ID NO: 392, and the second guide RNA molecule includes a targeting domain selected from the group consisting of SEQ ID NO: 3542 to SEQ ID NO: 4032;
[0210] (19) the first gRNA molecule includes a targeting domain selected from the group consisting of SEQ ID NO: 84 to SEQ ID NO: 392, and the second guide RNA molecule includes a targeting domain selected from the group consisting of SEQ ID NO: 4033 to SEQ ID NO: 4589 and SEQ ID NO: 5720 to SEQ ID NO: 5815;
[0211] (20) the first gRNA molecule includes a targeting domain selected from the group consisting of SEQ ID NO: 84 to SEQ ID NO: 392, and the second guide RNA molecule includes a targeting domain selected from the group consisting of SEQ ID NO: 4590 to SEQ ID NO: 5277;
[0212] (21) the first gRNA molecule includes a targeting domain selected from the group consisting of SEQ ID NO: 393 to SEQ ID NO: 532, and the second guide RNA molecule includes a targeting domain selected from the group consisting of SEQ ID NO: 2942 to SEQ ID NO: 3270;
[0213] (22) the first gRNA molecule includes a targeting domain selected from the group consisting of SEQ ID NO: 393 to SEQ ID NO: 532, and the second guide RNA molecule includes a targeting domain selected from the group consisting of SEQ ID NO: 3271 to SEQ ID NO: 3541;
[0214] (23) the first gRNA molecule includes a targeting domain selected from the group consisting of SEQ ID NO: 393 to SEQ ID NO: 532, and the second guide RNA molecule includes a targeting domain selected from the group consisting of SEQ ID NO: 3542 to SEQ ID NO: 4032;
[0215] (24) the first gRNA molecule includes a targeting domain selected from the group consisting of SEQ ID NO: 393 to SEQ ID NO: 532, and the second guide RNA molecule includes a targeting domain selected from the group consisting of SEQ ID NO: 4033 to SEQ ID NO: 4589 and SEQ ID NO: 5720 to SEQ ID NO: 5815;
[0216] (25) the first gRNA molecule includes a targeting domain selected from the group consisting of SEQ ID NO: 393 to SEQ ID NO: 532, and the second guide RNA molecule includes a targeting domain selected from the group consisting of SEQ ID NO: 4590 to SEQ ID NO: 5277;
[0217] (26) the first gRNA molecule includes a targeting domain selected from the group consisting of SEQ ID NO: 533 to SEQ ID NO: 839, and the second guide RNA molecule includes a targeting domain selected from the group consisting of SEQ ID NO: 2942 to SEQ ID NO: 3270;
[0218] (27) the first gRNA molecule includes a targeting domain selected from the group consisting of SEQ ID NO: 533 to SEQ ID NO: 839, and the second guide RNA molecule includes a targeting domain selected from the group consisting of SEQ ID NO: 3271 to SEQ ID NO: 3541;
[0219] (28) the first gRNA molecule includes a targeting domain selected from the group consisting of SEQ ID NO: 533 to SEQ ID NO: 839, and the second guide RNA molecule includes a targeting domain selected from the group consisting of SEQ ID NO: 3542 to SEQ ID NO: 4032;
[0220] (29) the first gRNA molecule includes a targeting domain selected from the group consisting of SEQ ID NO: 533 to SEQ ID NO: 839, and the second guide RNA molecule includes a targeting domain selected from the group consisting of SEQ ID NO: 4033 to SEQ ID NO: 4589 and SEQ ID NO: 5720 to SEQ ID NO: 5815;
[0221] (30) the first gRNA molecule includes a targeting domain selected from the group consisting of SEQ ID NO: 533 to SEQ ID NO: 839, and the second guide RNA molecule includes a targeting domain selected from the group consisting of SEQ ID NO: 4590 to SEQ ID NO: 5277;
[0222] (31) the first gRNA molecule includes a targeting domain selected from the group consisting of SEQ ID NO: 840 to SEQ ID NO: 968, and the second guide RNA molecule includes a targeting domain selected from the group consisting of SEQ ID NO: 2942 to SEQ ID NO: 3270;
[0223] (32) the first gRNA molecule includes a targeting domain selected from the group consisting of SEQ ID NO: 840 to SEQ ID NO: 968, and the second guide RNA molecule includes a targeting domain selected from the group consisting of SEQ ID NO: 3271 to SEQ ID NO: 3541;
[0224] (33) the first gRNA molecule includes a targeting domain selected from the group consisting of SEQ ID NO: 840 to SEQ ID NO: 968, and the second guide RNA molecule includes a targeting domain selected from the group consisting of SEQ ID NO: 3542 to SEQ ID NO: 4032;
[0225] (34) the first gRNA molecule includes a targeting domain selected from the group consisting of SEQ ID NO: 840 to SEQ ID NO: 968, and the second guide RNA molecule includes a targeting domain selected from the group consisting of SEQ ID NO: 4033 to SEQ ID NO: 4589 and SEQ ID NO: 5720 to SEQ ID NO: 5815; or
[0226] (35) the first gRNA molecule includes a targeting domain selected from the group consisting of SEQ ID NO: 840 to SEQ ID NO: 968, and the second guide RNA molecule includes a targeting domain selected from the group consisting of SEQ ID NO: 4590 to SEQ ID NO: 5277.

[0227] In embodiments of the cell, the targeting domain of the first gRNA molecule, the targeting domain of the second gRNA molecule, and, if present, the targeting domain of the third gRNA molecule, include, e.g., consist of, the sequences of any of:
[0228] g) Combination A1 to combination A72 of Table 33;
[0229] h) Combination B1 to combination B84 of Table 34;
[0230] i) Combination C1 to combination C42 of Table 35;
[0231] j) Combination D1 to combination D36 of Table 36;
[0232] k) Combination E1 to combination E30 of Table 37; or
[0233] l) Combination F1 to combination F60 of Table 38.

[0234] In embodiments of the cell, the first gRNA molecule includes a targeting domain including SEQ ID NO: 5569, SEQ ID NO: 5592, or SEQ ID NO: 5586, and the second gRNA molecule includes a targeting domain including SEQ ID NO: 5775.

[0235] In any of the aforementioned cell aspects and embodiments, a gene including a target sequence complementary to the targeting domain of the first gRNA molecule, and, optionally, a gene including a target sequence complementary to the targeting domain of the second gRNA molecule and/or a gene including a target sequence complementary to the targeting domain of the third gRNA molecule, has been altered such that expression of a functional product of the gene including a target sequence complementary to the targeting domain of the first gRNA molecule, and, optionally, the gene including a target sequence complementary to the targeting domain of the second gRNA molecule and/or a functional product of a gene including a target sequence complementary to the targeting domain of the third gRNA molecule, has been reduced or eliminated.

[0236] In another aspect, the invention provides a method of providing an anti-tumor immunity in a subject, the method including administering to the subject an effective amount of a cell as described herein, for example, a cell of any of the aforementioned cell aspects and embodiments.

[0237] In another aspect, the invention provides a method of treating cancer in a subject, the method including administering to the subject an effective amount of a cell as described herein, for example, a cell of any of the aforementioned cell aspects and embodiments.

[0238] In another aspect, the invention provides a method of treating a subject having a disease associated with expression of a tumor antigen, e.g., a proliferative disease, a precancerous condition, a cancer, and a non-cancer related indication associated with expression of the tumor antigen, the method including administering to the subject an effective amount of a cell as described herein, for example, a cell of any of the aforementioned cell aspects and embodiments. In embodiments, the disease associated with expression of a tumor antigen is cancer or a non-cancer related indication. In embodiments, Th disease is cancer selected from colon cancer, rectal cancer, renal-cell carcinoma, liver cancer, non-small cell carcinoma of the lung, cancer of the small intestine, cancer of the esophagus, melanoma, bone cancer, pancreatic cancer, skin cancer, cancer of the head or neck, cutaneous or intraocular malignant melanoma, uterine cancer, ovarian cancer, rectal cancer, cancer of the anal region, stomach cancer, testicular cancer, carcinoma of the fallopian tubes, carcinoma of the endometrium, carcinoma of the cervix, carcinoma of the vagina, carcinoma of the vulva, Hodgkin's Disease, non-Hodgkin's lymphoma, cancer of the endocrine system, cancer of the thyroid gland, cancer of the parathyroid gland, cancer of the adrenal gland, sarcoma of soft tissue, cancer of the urethra, cancer of the penis, solid tumors of childhood, cancer of the bladder, cancer of the kidney or ureter, carcinoma of the renal pelvis, neoplasm of the central nervous system (CNS), primary CNS lymphoma, tumor angiogenesis, spinal axis tumor, brain stem glioma, pituitary adenoma, Kaposi's sarcoma, epidermoid cancer, squamous cell cancer, T-cell lymphoma, environmentally induced cancers, combinations of said cancers, and metastatic lesions of said cancers. In embodiments, the cancer is a hematologic cancer selected from the group consisting of chronic lymphocytic leukemia (CLL), acute leukemias, acute lymphoid leukemia (ALL), B-cell acute lymphoid leukemia (B-ALL), T-cell acute lymphoid leukemia (T-ALL), chronic myelogenous leukemia (CML), acute myeloid leukemia (AML), B cell prolymphocytic leukemia, blastic plasmacytoid dendritic cell neoplasm, Burkitt's lymphoma, diffuse large B cell lymphoma, follicular lymphoma, hairy cell leukemia, small cell- or a large cell-follicular lymphoma, malignant lymphoproliferative conditions, MALT lymphoma, mantle cell lymphoma, marginal zone lymphoma, multiple myeloma, myelodysplasia and myelodysplastic syndrome, non-Hodgkin's lymphoma, Hodgkin's lymphoma, plasmablastic lymphoma, plasmacytoid dendritic cell neoplasm, Waldenstrom macroglobulinemia, and pre-leukemia.

[0239] In embodiments of any of the aforementioned methods, the method further includes administering a chemotherapeutic agent, for example, cyclophosphamide, fludarabine, or cyclophosphamide and fludarabine. In embodiments of the methods, the method includes administering a lymphodepleting agent or immunosuppressant prior to administering to the subject an effective amount of the cell as described herein, for example, a cell of any of the aforementioned cell aspects and embodiments.

[0240] In another aspect, the invention provides a method of preparing cells (e.g., a population of cells) for immunotherapy, the method including: (a) modifying cells by reducing or eliminating expression of a component of a T-cell receptor (TCR), for example, by introducing into said cells a gRNA molecule (as described herein), e.g., more than one gRNA molecule, of any of 2b to 2 h, e.g., a gRNA molecule, e.g., more than one gRNA molecule, of any of claims 3, 4, 5, 10, 11 or 12; (b) modifying cells by reducing or eliminating expression of an HLA (e.g., HLA-A, HLA-B, and/or HLA-C) or B2M, for example, by introducing into said cells a gRNA molecule (as described herein), e.g., more than one gRNA molecule, of any of 2a, 2i, 2j or 2k, e.g., a gRNA molecule, e.g., more than one gRNA molecule, of any of claims 6 or 7; and (c) expanding said cells. In embodiments, the method further includes modifying said cells by reducing or eliminating expression of CIITA, for example, by introducing into said cells a gRNA molecule (as described herein), e.g., more than one gRNA molecule, of 2p, e.g., a gRNA molecule, e.g., more than one gRNA molecule, of any of claims 8 or 9, wherein said modifying optionally takes place before the step of expanding said cells.

[0241] In another aspect, the invention provides a method of preparing cells (e.g., a population of cells) for immunotherapy including: (a) modifying cells by reducing or eliminating expression of a component of a T-cell receptor (TCR), for example, by introducing into said cells a gRNA molecule (as described herein), e.g., more than one gRNA molecule, of any of 2b to 2 h, e.g., a gRNA molecule (as described herein), e.g., more than one gRNA molecule, of any of claims 3, 4, 5, 10, 11 or 12; (b) modifying cells by reducing or eliminating expression of a target for an immunosuppressant, for example, by introducing into said cells a gRNA molecule (as described herein), e.g., more than one gRNA molecule (as described herein), of any of 2l, 2m, 2n or 2o, e.g., a gRNA molecule (as described herein), e.g., more than one gRNA molecule, of claim 13; and (c) expanding said cells.

[0242] In embodiments of any of the aforementioned methods of preparing cells, the method further includes (d) modifying cells by reducing or eliminating expression of a first inhibitory molecule or downstream effector of signaling through an inhibitory molecule, for example, introducing into said cells a gRNA molecule (as described herein), e.g., more than one gRNA molecule, of claim 14 or 15; wherein said modifying optionally takes place before the step of expanding said cells.

[0243] In another aspect, the invention provides a method of preparing cells (e.g., a population of cells) for immunotherapy including: (a) modifying cells by reducing or eliminating expression of a first inhibitory molecule or downstream effector of signaling through an inhibitory molecule, for example, by introducing into said cells a gRNA molecule (as described herein), e.g., more than one gRNA molecule, of claim 14, e.g., a gRNA molecule, e.g., more than one gRNA molecule, of any of claims 15-17; and (c) expanding said cells.

[0244] In embodiments of any of the aforementioned methods of preparing cells, the method further includes (e) modifying cells by reducing or eliminating expression of a second inhibitory molecule or downstream effector of signaling through an inhibitory molecule, for example, by introducing into said cells a gRNA molecule, e.g., more than one gRNA molecule, of claim 14 or 15, wherein the first inhibitory molecule or downstream effector of signaling through an inhibitory molecule and second inhibitory molecule or downstream effector of signaling through an inhibitory molecule are different.

[0245] In embodiments of any of the aforementioned methods of preparing cells, the introduction of each of the gRNA molecules is simultaneous or sequential. In embodiments, the introduction of each of the gRNA molecules is sequential, and separated by a period of at least 24 hours, 2 days, 3 days, 4 days, 5 days, 6 days, 7 days, 8 days, 9 days or 10 days.

[0246] In embodiments of any of the aforementioned methods of preparing cells, the method further includes introducing into the cells nucleic acid encoding a chimeric antigen receptor (CAR), e.g., described herein. In embodiments, the nucleic acid encoding a CAR is disposed on a template nucleic acid. In embodiments, the nucleic acid encoding a CAR is disposed on a RNA vector. In embodiments, the nucleic acid encoding a CAR is disposed on a lentiviral vector.

[0247] In embodiments of any of the aforementioned methods of preparing cells, the method further includes isolating cells which are negative for TCR expression. In embodiments, the isolating results in a population of cells in which greater than about 75%, for example, greater than about 80%, 85%, 90%, 91%, 92%, 93, 94%, 95%, 96%, 97%, 98%, 99% or 99.5% of the cells are negative for TCR expression. In embodiments, the step of isolating cells which are negative for TCR expression includes contacting the cell population with a composition including an antibody specific for a component of a T cell receptor (TCR), optionally bound to a solid support or detectable label, and isolating the cells which do not bind to said antibody. In embodiments, the cells are immune effector cells, for example, T cells or NK cells, for example, T cells. In embodiments, the cells are allogeneic with respect to a subject to which they are to be administered, for example, the cells are isolated from a healthy donor, e.g., a donor which does not suffer from a condition associated with expression of a tumor antigen. In embodiments, the cells are autologous with respect to a subject to which they are to be administered. In embodiments of any of the aforementioned methods of preparing cells, steps (a) and/or (b) are performed ex vivo. In embodiments, step (c) is performed ex vivo. In embodiments, the expansion of step (c) is performed for a period of at least 2, 3, 4, 5, 6, 7, 8, 9, 10, 11, 12, 13, 14, or 15 days, or for a period of 2-15, 2-14, 2-13, 2-12, 2-11, 2-10, 3-10, 2-9, 3-9, 2-8, 3-8, 2-7, 3-7, 2-6, 3-6, 2-5, or 3-5 days.

[0248] In embodiments of any of the aforementioned methods of preparing cells, the gRNA molecules are gRNA molecules described herein, and the targeting domains of each of the gRNA molecules (for example, used in combination) include, for example, consist of, the sequences of any of the combinations listed in Table 33, Table 34, Table 35, Table 36, Table 37 or Table 38. In embodiments the targeting domains of each of the gRNA molecules include, for example, consist, of the sequences of any of:
[0249] a) Combination A1 to combination A72 of Table 33, for example, combination A1 to A4, combination A5 to A8, combination A37 to A40, or combination A41 to A44;
[0250] b) Combination B1 to combination B84 of Table 34;
[0251] c) Combination C1 to combination C42 of Table 35;
[0252] d) Combination D1 to combination D36 of Table 36, for example, combination D2, combination D4, combination D20, or combination D22;
[0253] e) Combination E1 to combination E30 of Table 37, for example, combination E2, combination E4, combination E8, or combination E10; or
[0254] f) Combination F1 to combination F60 of Table 38, for example, any of combination F1 to F4, combination F5 to F8, combination F13 to F16, or combination F17 to F20.

[0255] In another aspect, the invention provides a method of treating a subject in need thereof that includes administering cells (e.g., population of cells) prepared by a method of preparing cells described herein, for example, a method of any of the aforementioned aspects and embodiments of methods of preparing cells. In embodiments, particularly in embodiments that include a gRNA molecule which binds to a target sequence of a target for an immunosuppressant, the method further includes administering an immunosuppressive agent, for example, rapamycin, a rapalog or mTor inhibitor, e.g., RAD001. In embodiments, the subject has a disease associated with expression of a tumor antigen, e.g., a proliferative disease, a precancerous condition, a cancer, and a non-cancer related indication associated with expression of the tumor antigen, wherein said administration treats said disease associated with expression of a tumor antigen. In embodiments, the disease associated with expression of a tumor antigen is cancer or a non-cancer related indication. In embodiments, the disease is cancer selected from colon cancer, rectal cancer, renal-cell carcinoma, liver cancer, non-small cell carcinoma of the lung, cancer of the small intestine, cancer of the esophagus, melanoma, bone cancer, pancreatic cancer, skin cancer, cancer of the head or neck, cutaneous or intraocular malignant melanoma, uterine cancer, ovarian cancer, rectal cancer, cancer of the anal region, stomach cancer, testicular cancer, carcinoma of the fallopian tubes, carcinoma of the endometrium, carcinoma of the cervix, carcinoma of the vagina, carcinoma of the vulva, Hodgkin's Disease, non-Hodgkin's lymphoma, cancer of the endocrine system, cancer of the thyroid gland, cancer of the parathyroid gland, cancer of the adrenal gland, sarcoma of soft tissue, cancer of the urethra, cancer of the penis, solid tumors of childhood, cancer of the bladder, cancer of the kidney or ureter, carcinoma of the renal pelvis, neoplasm of the central nervous system (CNS), primary CNS lymphoma, tumor angiogenesis, spinal axis tumor, brain stem glioma, pituitary adenoma, Kaposi's sarcoma, epidermoid cancer, squamous cell cancer, T-cell lymphoma, environmentally induced cancers, combinations of said cancers, and metastatic lesions of said cancers. In embodiments, the cancer is a hematologic cancer selected from the group consisting of chronic lymphocytic leukemia (CLL), acute leukemias, acute lymphoid leukemia (ALL), B-cell acute lymphoid leukemia (B-ALL), T-cell acute lymphoid leukemia (T-ALL), chronic myelogenous leukemia (CML), acute myeloid leukemia (AML), B cell prolymphocytic leukemia, blastic plasmacytoid dendritic cell neoplasm, Burkitt's lymphoma, diffuse large B cell lymphoma, follicular lymphoma, hairy cell leukemia, small cell- or a large cell-follicular lymphoma, malignant lymphoproliferative conditions, MALT lymphoma, mantle cell lymphoma, marginal zone lymphoma, multiple myeloma, myelodysplasia and myelodysplastic syndrome, non-Hodgkin's lymphoma, Hodgkin's lymphoma, plasmablastic lymphoma, plasmacytoid dendritic cell neoplasm, Waldenstrom macroglobulinemia, and pre-leukemia.

[0256] In another aspect, the invention provides method of treating a patient suffering from a disease including:
[0257] (a) providing a population of cells from an allogeneic donor;
[0258] (b) introducing into the cells a CRISPR System (e.g., an S. pyogenes Cas9 CRISPR system) including a first gRNA molecule (or nucleic acid encoding said gRNA molecule) including a targeting domain complementary to a target sequence in a gene selected from CD247, CD3D, CD3 E, CD3G, TRAC, TRBC1, and TRBC2;
[0259] (c) optionally, selecting those cells in which expression of functional TCR has been reduced or eliminated;
[0260] (d) transducing the cells with nucleic acid encoding a CAR; and
[0261] (e) administering the cells to a patient in need thereof, e.g., a patient who has a disease associated with expression of an antigen recognized by the CAR. In embodiments, the first gRNA molecule to CD247, CD3D, CD3 E, CD3G, TRAC, TRBC1, or TRBC2 is a gRNA molecule of any of 2(b)-2(h), e.g., is a gRNA molecule of any of claims 3, 4, 5, 10, 11 or 12.

[0262] In embodiments, the method of treating a patient suffering from a disease further includes introducing into the cells a CRISPR System (e.g., an S. pyogenes Cas9 CRISPR system) including a second gRNA molecule (or nucleic acid encoding said gRNA molecule) including a targeting domain complementary to a target sequence in a gene selected from B2M, HLA-A, HLA-B or HLA-C. In embodiments, the second gRNA to B2M, HLA-A, HLA-B or HLA-C is a gRNA molecule of any of 2(a) or 2(i)-2(k), e.g., is a gRNA molecule of any of claims 6 or 7. In embodiments, the method further includes introducing into the cells a CRISPR System (e.g., an S. pyogenes Cas9 CRISPR system) including a third gRNA molecule (or nucleic acid encoding said gRNA molecule) including a targeting domain complementary to a target sequence in a gene selected from CIITA, RFXANK, RFXAP, RFX5, HLA-DM, HLA-DO, HLA-DR, HLA-DQ and HLA-DP. In embodiments, the third gRNA molecule is a gRNA molecule of any of 2(a) or 2(i)-2(k), e.g., is a gRNA molecule of any of claims 6 or 7.

[0263] In other embodiments, the method of treating a patient suffering from a disease further includes introducing into the cells a CRISPR System (e.g., an S. pyogenes Cas9 CRISPR system) including a second gRNA molecule (or nucleic acid encoding said gRNA molecule) including a targeting domain complementary to a target sequence in a gene selected from DCK, CD52, FKBP1A or NR3C1. In embodiments, the second gRNA molecule to DCK, CD52, FKBP1A or NR3C1 is a second gRNA molecule of any of 2(l)-2(o), e.g., is a second gRNA molecule of claim 13. In embodiments where the second gRNA is to DCK, the method further including administering a nucleoside analog-based drug to said patient, for example, the nucleoside analog-based drug is cytarabine or gemcitabine. In embodiments, where the second gRNA is to CD52, the method further including administering an anti-CD52 antibody or antigen-binding fragment thereof to said patient, for example, the anti-CD52 antibody or antigen-binding fragment thereof is alemtuzumab (CAMPATH®). In embodiments where the second gRNA is to FKBP1A, the method further including administering FK506, cyclosporine, rapamycin or rapalog, or mTor inhibitor such as RAD001, to said patient. In embodiments where the second gRNA is to NR3C1, the method further including administering a corticosteroid to said patient, for example, the corticosteroid is dexamethasone.

[0264] In embodiments of any of the aforementioned methods of treating a patient suffering from a disease, the gRNA molecules are gRNA molecules described herein, and the targeting domains of each of the gRNA molecules (for example, used in combination) include, for example, consist of, the sequences of any of the combinations listed in Table 33, Table 34, Table 35, Table 36, Table 37 or Table 38. In embodiments the targeting domains of each of the gRNA molecules include, for example, consist, of the sequences of any of:
[0265] a) Combination A1 to combination A72 of Table 33, for example, combination A1 to A4, combination A5 to A8, combination A37 to A40, or combination A41 to A44;
[0266] b) Combination B1 to combination B84 of Table 34;
[0267] c) Combination C1 to combination C42 of Table 35;
[0268] d) Combination D1 to combination D36 of Table 36, for example, combination D2, combination D4, combination D20, or combination D22;
[0269] e) Combination E1 to combination E30 of Table 37, for example, combination E2, combination E4, combination E8, or combination E10; or
[0270] f) Combination F1 to combination F60 of Table 38, for example, any of combination F1 to F4, combination F5 to F8, combination F13 to F16, or combination F17 to F20.

[0271] In embodiments of any of the aforementioned methods of treating a patient suffering from a disease, the method further includes introducing into the cells a CRISPR System (e.g., an S. pyogenes Cas9 CRISPR system) including a fourth gRNA molecule (or nucleic acid encoding said gRNA molecule) including a targeting domain complementary to a target sequence in a gene selected from CD274, HAVCR2, LAG3, PDCD1, PD-L2, CTLA4, CEACAM (e.g., CEACAM-1, CEACAM-3 and/or CEACAM-5), VISTA, BTLA, TIGIT, LAIR1, CD160, 2B4, CD80, CD86, B7-H3 (CD113), B7-H4 (VTCN1), HVEM (TNFRSF14 or CD107), KIR, A2aR, MHC class I, MHC class II, GAL9, adenosine, and TGF beta, or PTPN11, for example, a fourth gRNA molecule is to CD274, HAVCR2, LAG3, PDCD1 or PTPN11, for example, a gRNA molecule of any of 15(a)-(e), e.g., a gRNA molecule of any of claims 16-17.

[0272] In another aspect, the invention provides a method of treating a patient suffering from a disease including:
[0273] (a) providing a population of cells (as described herein), for example, immune effector cells;
[0274] (b) introducing into the population of cells a CRISPR System (e.g., an S. pyogenes Cas9 CRISPR system) including a first gRNA molecule (or nucleic acid encoding said gRNA molecule) including a targeting domain complementary to a target sequence in a gene selected from CD247, CD3D, CD3 E, CD3G, TRAC, TRBC1, and TRBC2;
[0275] (c) introducing into the population of cells a CRISPR System (e.g., an S. pyogenes Cas9 CRISPR system) including a second gRNA molecule (or nucleic acid encoding said gRNA molecule) including a targeting domain complementary to a target sequence in a gene selected from B2M, HLA-A, HLA-B and HLA-C;
[0276] (d) optionally, selecting those cells in which expression of functional TCR, functional B2M, or both functional TCR and B2M has been reduced or eliminated;
[0277] (d) introducing into the population of cells a nucleic acid encoding a CAR; and
[0278] (e) administering the population of cells to a patient in need thereof, e.g., a patient who has a disease associated with expression of an antigen recognized by the CAR. In embodiments of the method, the method further comprises (f) introducing into the population of cells a CRISPR System (e.g., an S. pyogenes Cas9 CRISPR system) including a third gRNA molecule (or nucleic acid encoding said gRNA molecule) including a targeting domain complementary to a target sequence in a gene selected from CIITA, RFXANK, RFX5, and RFXAP. In embodiments, the first gRNA molecule includes a targeting domain complementary to a target sequence in a gene selected from TRAC, TRBC1 and TRBC2, for example, as described herein, for example, TRAC, for example, includes (for example consists of) a targeting domain selected from SEQ ID NO: 5569, SEQ ID NO: 5585, SEQ ID NO: 5592, SEQ ID NO: 5601, SEQ ID NO: 5589, SEQ ID NO: 5600, SEQ ID NO: 5594, SEQ ID NO: 5571, SEQ ID NO: 5593, SEQ ID NO: 5574, SEQ ID NO: 5598, SEQ ID NO: 5586, SEQ ID NO: 5599, SEQ ID NO: 5591, SEQ ID NO: 5610, SEQ ID NO: 5608, SEQ ID NO: 5617, SEQ ID NO: 5619, and SEQ ID NO: 5620, for example, selected from SEQ ID NO: 5569, SEQ ID NO: 5592, SEQ ID NO: 5587, SEQ ID NO: 5599, SEQ ID NO: 5600, and SEQ ID NO: 5586, e.g., selected from SEQ ID NO: 5569, SEQ ID NO: 5586, and SEQ ID NO: 5592. In other embodiments, the first gRNA molecule includes a targeting domain complementary to a target sequence in a gene selected from CD3 E, CD3G and CD3D, for example, as described herein. In embodiments, the second gRNA molecule includes a targeting domain complementary to a target sequence in a B2M gene, for example, as described herein, for example, including (for example consisting of) a targeting domain selected from SEQ ID NO: 5519, SEQ ID NO: 5497, SEQ ID NO: 5499, SEQ ID NO: 5498, SEQ ID NO: 5503, SEQ ID NO: 5496, SEQ ID NO: 5507, SEQ ID NO: 5515, SEQ ID NO: 5493, SEQ ID NO: 5506, SEQ ID NO: 5509, SEQ ID NO: 5517, SEQ ID NO: 5521, SEQ ID NO: 5520, SEQ ID NO: 5500, SEQ ID NO: 5494, SEQ ID NO: 5508, SEQ ID NO: 5514, and SEQ ID NO: 5492, for example, selected from SEQ ID NO: 5496, SEQ ID NO: 5498 and SEQ ID NO: 5509. In embodiments, the third gRNA molecule includes a targeting domain complementary to a target sequence in a CIITA gene, for example, as described herein, for example, including (for example consisting of) a targeting domain selected from SEQ ID NO: 7771, SEQ ID NO: 7769, SEQ ID NO: 7773, SEQ ID NO: 7726, SEQ ID NO: 7758, SEQ ID NO: 7739, SEQ ID NO: 7779, SEQ ID NO: 7770, SEQ ID NO: 7749, SEQ ID NO: 7754, SEQ ID NO: 7745, SEQ ID NO: 7785, SEQ ID NO: 7731, SEQ ID NO: 7772, SEQ ID NO: 7743, or SEQ ID NO: 7750, for example, selected from SEQ ID NO: 7769, SEQ ID NO: 7771, SEQ ID NO: 7739 or SEQ ID NO: 7785. In preferred embodiments, the targeting domains of each of the gRNA molecules (for example, used in combination) include, for example, consist of, the sequences of any of the combinations listed in Table 33, Table 34, or Table 38. In embodiments the targeting domains of each of the gRNA molecules include, for example, consist, of the sequences of any of:
[0279] a) Combination A1 to combination A72 of Table 33, for example, combination A1 to A4, combination A5 to A8, combination A37 to A40, or combination A41 to A44;
[0280] b) Combination B1 to combination B84 of Table 34; or
[0281] c) Combination F1 to combination F60 of Table 38, for example, any of combination F1 to F4, combination F5 to F8, combination F13 to F16, or combination F17 to F20.

[0282] In embodiments of the method of treating a patient suffering from a disease, the method further includes introducing into said cells a nucleic acid molecule encoding an NK inhibitory molecule (e.g., as described herein), e.g., a nucleic acid molecule encoding an HLA-G:B2M fusion, e.g., a nucleic acid molecule encoding SEQ ID NO: 10674. In embodiments of the method of treating a patient suffering from a disease the cell (or population of cells) is an immune effector cell (or population of immune effector cells), for example, a T cell (or population of T cells). In embodiments, the cell (or population of cells) is allogeneic relative to the patient, for example, is isolated from a healthy human donor. In other embodiments, the cell (or population of cells) is autologous relative to the patient. In embodiments, the CAR is a CD19 CAR (for example, described herein), for example, a CD19 CAR including an antigen binding domain including any one of SEQ ID NO: 7883 to SEQ ID NO: 7898. In other embodiments, the CAR is a BCMA CAR, for example, including an antigen recognition domain including any one of SEQ ID NO: 7939 to SEQ ID NO: 8112 or SEQ ID NO: 8155 to SEQ ID NO: 8166, e.g., includes an antigen recognition domain including, e.g., consisting of, SEQ ID NO: 7949, for example, including any one of SEQ ID NO: 8549 to SEQ ID NO: 8621, e.g., including, e.g., consisting of, SEQ ID NO: 8559.

[0283] In another aspect, the invention provides a modified cell, which has reduced or eliminated expression of: a) a component of the T cell receptor; b) B2M; and/or c) CIITA, relative to an unmodified cell of the same type. In embodiments, the component of the T cell receptor is a TCR alpha chain or a TCR beta chain, for example, the TCR alpha chain. In other embodiments, the component of the TCR is CD3 delta, CD3 epsilon, or CD3 gamma, e.g., is CD3 epsilon. In embodiments, the modified cell (or population of cells) has reduced or eliminated expression of a component of the T cell receptor, B2M and CIITA.

[0284] In another aspect, the invention provides a modified cell, including an insertion or deletion of a base pair, e.g., more than one base pair, at or near: a) a gene encoding a component of the T cell receptor; b) B2M; and/or c) CIITA; relative to an unmodified cell of the same type. In embodiments, each of said insertions or deletions is an indel. In embodiments, each of said insertion or deletion is a frameshift mutation. In embodiments, the modified cell (or population of cells) an insertion or deletion of a base pair, e.g., more than one base pair, at or near a gene encoding a component of the T cell receptor, B2M and CIITA.

[0285] In another aspect, the invention provides a population of cells including the modified cell of any the aforementioned cell (e.g., modified cell) aspects and embodiments, wherein in at least about 30% of the cells, at least one said insertion or deletion is a frameshift mutation, e.g., as measured by NGS.

[0286] In another aspect, the invention provides a cell including (e.g., a population of cells including a cell, e.g., more than one cell, including):
[0287] (a) Nucleic acid sequence encoding a CAR, e.g., as described herein;
[0288] (b) Optionally, nucleic acid sequence encoding an NK inhibitory molecule, e.g., as described herein, e.g., nucleic acid encoding an HLA-G or HLA-G:B2M fusion as described herein;
[0289] (c) An indel at or near a sequence of a gene encoding a component of a TCR (e.g., TRAC, TRBC1 TRBC2, CD3 E, CD3D or CD3G, e.g. TRAC) or its regulatory elements, e.g., an indel at or near a target sequence of a gRNA including a targeting domain to a component of a TCR (e.g., TRAC, TRBC1, TRBC2, CD3 E, CD3D, or CD3G e.g. TRAC), e.g., including a targeting domain listed in Table 1, Table 4, Table 5, Table 6e, Table 6f, or Table 6g;
[0290] (d) An indel at or near a sequence of the gene encoding B2M or its regulatory elements, e.g., an indel at or near a target sequence of a gRNA including a targeting domain to B2M, e.g., including a targeting domain listed in Table 1 or Table 3;
[0291] (e) Optionally, an indel at or near a sequence of the gene encoding CIITA or its regulatory elements, e.g., an indel at or near a target sequence of a gRNA including a targeting domain to CIITA, e.g., including a targeting domain listed in Table 1 or Table 6c; and
[0292] (f) Optionally, an indel at or near a sequence of the gene encoding LILRB1 or its regulatory elements, e.g., an indel at or near a target sequence of a gRNA including a targeting domain to LILRB1, e.g., including a targeting domain listed in Table 6d;

[0293] Wherein the cell (or population of cells including said cell) expresses the CAR and, optionally, the NK inhibitory molecule, and exhibits reduced or eliminated expression and/or function of one or more of: i) a component of a TCR (e.g., TRAC, TRBC1 TRBC2, CD3D, CD3 E or CD3G, e.g. TRAC), ii) B2M, iii) CIITA, and/or iv) LILRB1. In embodiments the targeting domain sequences of the gRNA molecules (as described herein) to a component of a TCR, B2M and CIITA include, for example, consist of the targeting domains listed in any combination listed in Table 33, Table 34 or Table 38, for example,
[0294] a) Combination A1 to combination A72 of Table 33, for example, combination A1 to A4, combination A5 to A8, combination A37 to A40, or combination A41 to A44;
[0295] b) Combination B1 to combination B84 of Table 34; or
[0296] c) Combination F1 to combination F60 of Table 38, for example, any of combination F1 to F4, combination F5 to F8, combination F13 to F16, or combination F17 to F20.

[0297] In another aspect, the invention provides a cell including (e.g., a population of cells including a cell, e.g., more than one cell, including):
[0298] (a) Nucleic acid sequence encoding a CAR, e.g., as described herein;
[0299] (b) Optionally, nucleic acid sequence encoding an NK inhibitory molecule, e.g., as described herein, e.g., nucleic acid encoding an HLA-G as described herein;
[0300] (c) An indel at or near a sequence of a gene encoding a component of a TCR (e.g., TRAC, TRBC1 TRBC2, CD3D, CD3 E or CD3G, e.g. TRAC) or its regulatory elements, e.g., an indel at or near a target sequence of a gRNA including a targeting domain to a component of a TCR (e.g., TRAC, TRBC1 TRBC2, CD3D, CD3 E or CD3G, e.g. TRAC), e.g., including a targeting domain listed in Table 1, Table 4, Table 5, Table 6e, Table 6f, or Table 6g;
[0301] (d) An indel at or near a sequence of the gene encoding NLRC5 or its regulatory elements, e.g., an indel at or near a target sequence of a gRNA including a targeting domain to NLRC5, e.g., including a targeting domain listed in Table 1;
[0302] (e) Optionally, an indel at or near a sequence of the gene encoding CIITA or its regulatory elements, e.g., an indel at or near a target sequence of a gRNA including a targeting domain to CIITA, e.g., including a targeting domain listed in Table 1 or Table 6c; and
[0303] (f) Optionally, an indel at or near a sequence of the gene encoding LILRB1 or its regulatory elements, e.g., an indel at or near a target sequence of a gRNA including a targeting domain to LILRB1, e.g., including a targeting domain listed in Table 6d;

[0304] Wherein the cell (or population of cells including one or more of said cells) expresses the CAR and, optionally, the NK inhibitory molecule, and exhibits reduced or eliminated expression and/or function of one or more of: i) a component of a TCR (e.g., TRAC, TRBC1 TRBC2, CD3D, CD3 E or CD3G, e.g. TRAC), ii) B2M, iii) NLRC5, and/or iv) LILRB1.

[0305] In another aspect, the invention provides a cell including (e.g., a population of cells including a cell, e.g., more than one cell, including):
[0306] (a) Nucleic acid sequence encoding a CAR, e.g., as described herein;
[0307] (b) An indel at or near a sequence of a gene encoding a component of a TCR (e.g., TRAC, TRBC1 TRBC2, CD3D, CD3 E or CD3G, e.g. TRAC) or its regulatory elements, e.g., an indel at or near a target sequence of a gRNA including a targeting domain to a component of a TCR (e.g., TRAC, TRBC1 TRBC2, CD3D, CD3 E or CD3G, e.g. TRAC), e.g., including a targeting domain listed in Table 1, Table 4, Table 5, Table 6e, Table 6f, or Table 6g; and
[0308] (c) An indel at or near a sequence of the gene encoding FKBP1A or its regulatory elements, e.g., an indel at or near a target sequence of a gRNA including a targeting domain to FKBP1A, e.g., including a targeting domain listed in Table 1 or Table 6b;

[0309] Wherein the cell (or population of cells including a cell, e.g., more than one cell, including) expresses the CAR, and exhibits reduced or eliminated expression and/or function of one or more of: i) a component of a TCR (e.g., TRAC, TRBC1 TRBC2, CD3D, CD3 E or CD3G, e.g. TRAC), and/or ii) FKBP12. In embodiments the targeting domain sequences of the gRNA molecules (as described herein) to a component of a TCR and FKBP1A include, for example, consist of the targeting domains listed in any combination listed in Table 35, Table 36 or Table 37, for example
[0310] a) Combination C1 to combination C42 of Table 35;
[0311] b) Combination D1 to combination D36 of Table 36, for example, combination D2, combination D4, combination D20, or combination D22; or
[0312] c) Combination E1 to combination E30 of Table 37, for example, combination E2, combination E4, combination E8, or combination E10.

[0313] In another aspect, the invention provides a cell including (e.g., a population of cells including a cell, e.g., more than one cell, including):
[0314] (a) Nucleic acid sequence encoding a CAR, e.g., as described herein;
[0315] (b) Nucleic acid sequence encoding a rapamycin-resistant mTor, e.g., as described herein, e.g., nucleic acid sequence encoding an mTor including a S2035 mutation, e.g., an S2035I mutation; and;
[0316] (c) An indel at or near a sequence of a gene encoding a component of a TCR (e.g., TRAC, TRBC1 TRBC2, CD3D, CD3 E or CD3G, e.g. TRAC) or its regulatory elements, e.g., an indel at or near a target sequence of a gRNA including a targeting domain to a component of a TCR (e.g., TRAC, TRBC1 TRBC2, CD3D, CD3 E or CD3G, e.g. TRAC), e.g., including a targeting domain listed in Table 1, Table 4, Table 5, Table 6e, Table 6f, or Table 6g;

[0317] Wherein the cell (or population of cells including said cell, e.g., more than one of said cell) expresses the CAR and the rapamycin-resistant mTor, and exhibits reduced or eliminated expression and/or function of a component of a TCR (e.g., TRAC, TRBC1 TRBC2, CD3D, CD3 E or CD3G, e.g. TRAC).

[0318] In embodiments, that include an indel at or near a gene encoding a component of the TCR, B2M and CIITA, the targeting domain of the gRNA molecule to a component of the TCR, the targeting domain of the gRNA molecule to B2M, and the targeting domain of the gRNA molecule to CIIRA comprise, e.g., consists of, respectively: a) the targeting domain sequences for said gRNA molecules listed in any combination of A1 to A72 in Table 33; b) the targeting domain sequences for said gRNA molecules listed in any combination of F1 to F60 in Table 38; or c) the targeting domain sequence for each gRNA molecule listed in any combination of B1 to B84 in Table 34.

[0319] In embodiments, that include an indel at or near a gene encoding a component of the TCR and FKBP1A, the targeting domain of the gRNA molecule to a component of the TCR, and the targeting domain of the gRNA molecule(s) to FKBP1A comprise, e.g., consists of, respectively, a) the targeting domain sequences for said gRNA molecules listed in any combination of C1 to C42 in Table 35; b) the targeting domain sequences for said gRNA molecules listed in any combination of D1 to D36 in Table 36; or c) the targeting domain sequences for said gRNA molecules listed in any combination of E1 to E30 in Table 37.

[0320] In embodiments of any of the cell aspects and embodiments described above, each of said indels in said cell is made by introducing into said cell a gRNA molecule, e.g., more than one gRNA molecule, (e.g., a CRISPR system, e.g., more than one CRISPR system, including said gRNA molecule, e.g., each of said more than one gRNA molecules), each including a targeting domain which is complementary to a target sequence at or near each of said indels.

[0321] In another aspect, the invention provides a population of cells, wherein at least about 30%, for example, at least about 50%, for example, at least about 75%, for example, at least about 90% of the cells of the population are a cell of any of the aforementioned cell aspects or embodiments. In embodiments, in at least about 30% of said cells (e.g., in at least about 40%, e.g., in at least about 50%, e.g., in at least about 60%, e.g., in at least about 70%, e.g., in at least about 80%, e.g., in at least about 90%, e.g., in at least about 95%, e.g., in at least about 99% of said cells), each of said indels is a frameshift mutation. In embodiments, including in any of the aforementioned cell aspects and embodiments, the invention provides a cell (or population of cells) that includes an indel listed in FIG. 34A, FIG. 34B or FIG. 49. In embodiments, including in any of the aforementioned cell aspects and embodiments, the invention provides a cell (or population of cells) that includes an indel listed in FIG. 36 or FIG. 48. In embodiments, including in any of the aforementioned cell aspects and embodiments, the invention provides a cell (or population of cells) that includes an indel listed in FIG. 38, FIG. 41, FIG. 44 or FIG. 50. In embodiments, including in any of the aforementioned cell aspects and embodiments, the invention provides a cell (or population of cells) that includes an indel listed in FIG. 53.

[0322] In another aspect, the invention provides a population of cells that include a cell of any of the aforementioned cell aspects and embodiments. In embodiments, at least about 20% of the cells of the population of cells is a cell of any of the aforementioned cell aspects and embodiments. In embodiments, at least about 50% of the cells of the population of cells is a cell of any of the aforementioned cell aspects and embodiments. In embodiments, less than about 5%, e.g., less than about 1%, e.g., less than about 0.01%, of the cells of the population of cells includes an off-target indel. In embodiments, the cell of the population of cells is engineered to express a chimeric antigen receptor (CAR). In embodiments, the CAR is a CD19 CAR (for example, described herein), for example, a CD19 CAR including an antigen binding domain including any one of SEQ ID NO: 7883 to SEQ ID NO: 7898, or includes the sequence of SEQ ID NO: 7909 or SEQ ID NO: 7920. In other embodiments, the CAR is a BCMA CAR, for example, including an antigen recognition domain including any one of SEQ ID NO: 7939 to SEQ ID NO: 8112 or SEQ ID NO: 8155 to SEQ ID NO: 8166, e.g., including an antigen recognition domain including, e.g., consisting of, SEQ ID NO: 7949, for example, including any one of SEQ ID NO: 8549 to SEQ ID NO: 8621, e.g., including, e.g., consisting of, SEQ ID NO: 8559. In embodiments, the cell is an animal cell, for example, a mammalian, primate, or human cell, e.g., a human cell. In embodiments, the cell is an immune effector cell (e.g., a population of immune effector cells), for example, a T cell or NK cell, for example, a T cell, for example, a CD4+ T cell, a CD8+ T cell, or a combination thereof. In embodiments, the cell is allogeneic relative to a patient to be administered said cell, for example, the cell is isolated from a healthy human subject. In other embodiments, the cell is autologous relative to a patient to be administered said cell.

[0323] In another aspect, the invention provides a method of treating a disease, e.g., a cancer, in a patient in need thereof, including administering the cell of any of the aforementioned cell aspects and embodiments. In embodiments, particularly in embodiments in which expression or function of a target for an immunosuppressant has been reduced or eliminated, the method further includes administering an immunosuppressant, e.g., RAD001.

[0324] In another aspect, the invention provides a gRNA molecule as described herein (for example in any of the aforementioned gRNA molecule aspects and embodiments), a composition as described herein (for example in any of the aforementioned composition aspects and embodiments), a nucleic acid as described herein (for example in any of the aforementioned nucleic acid aspects and embodiments), a vector as described herein (for example in any of the aforementioned vector aspects and embodiments), or a cell (or population of cells) as described herein (for example in any of the aforementioned cell (e.g., modified cell) or population of cells aspects and embodiments), for use as a medicament.

[0325] In another aspect, the invention provides a gRNA molecule as described herein (for example in any of the aforementioned gRNA molecule aspects and embodiments), a composition as described herein (for example in any of the aforementioned composition aspects and embodiments), a nucleic acid as described herein (for example in any of the aforementioned nucleic acid aspects and embodiments), a vector as described herein (for example in any of the aforementioned vector aspects and embodiments), or a cell (or population of cells) as described herein (for example in any of the aforementioned cell (e.g., modified cell) or population of cells aspects and embodiments), for use in the manufacture of a medicament.

[0326] In another aspect, the invention provides a gRNA molecule as described herein (for example in any of the aforementioned gRNA molecule aspects and embodiments), a composition as described herein (for example in any of the aforementioned composition aspects and embodiments), a nucleic acid as described herein (for example in any of the aforementioned nucleic acid aspects and embodiments), a vector as described herein (for example in any of the aforementioned vector aspects and embodiments), or a cell (or population of cells) as described herein (for example in any of the aforementioned cell (e.g., modified cell) or population of cells aspects and embodiments), for use in the treatment of a disease.

[0327] In another aspect, the invention provides a gRNA molecule as described herein (for example in any of the aforementioned gRNA molecule aspects and embodiments), a composition as described herein (for example in any of the aforementioned composition aspects and embodiments), a nucleic acid as described herein (for example in any of the aforementioned nucleic acid aspects and embodiments), a vector as described herein (for example in any of the aforementioned vector aspects and embodiments), or a cell (or population of cells) as described herein (for example in any of the aforementioned cell (e.g., modified cell) or population of cells aspects and embodiments), for use in the treatment of a disease, wherein the disease is a disease associated with expression of a tumor antigen, e.g., a proliferative disease, a precancerous condition, a cancer, and a non-cancer related indication associated with expression of the tumor antigen.

[0328] In another aspect, the invention provides a gRNA molecule as described herein (for example in any of the aforementioned gRNA molecule aspects and embodiments), a composition as described herein (for example in any of the aforementioned composition aspects and embodiments), a nucleic acid as described herein (for example in any of the aforementioned nucleic acid aspects and embodiments), a vector as described herein (for example in any of the aforementioned vector aspects and embodiments), or a cell (or population of cells) as described herein (for example in any of the aforementioned cell (e.g., modified cell) or population of cells aspects and embodiments), for use in the treatment of a cancer, wherein the cancer is a hematologic cancer selected from the group consisting of chronic lymphocytic leukemia (CLL), acute leukemias, acute lymphoid leukemia (ALL), B-cell acute lymphoid leukemia (B-ALL), T-cell acute lymphoid leukemia (T-ALL), chronic myelogenous leukemia (CML), acute myeloid leukemia (AML), B cell prolymphocytic leukemia, blastic plasmacytoid dendritic cell neoplasm, Burkitt's lymphoma, diffuse large B cell lymphoma, follicular lymphoma, hairy cell leukemia, small cell- or a large cell-follicular lymphoma, malignant lymphoproliferative conditions, MALT lymphoma, mantle cell lymphoma, marginal zone lymphoma, multiple myeloma, myelodysplasia and myelodysplastic syndrome, non-Hodgkin's lymphoma, Hodgkin's lymphoma, plasmablastic lymphoma, plasmacytoid dendritic cell neoplasm, Waldenstrom macroglobulinemia, and pre-leukemia.

[0329] In another aspect, the invention provides a gRNA molecule as described herein (for example in any of the aforementioned gRNA molecule aspects and embodiments), a composition as described herein (for example in any of the aforementioned composition aspects and embodiments), a nucleic acid as described herein (for example in any of the aforementioned nucleic acid aspects and embodiments), a vector as described herein (for example in any of the aforementioned vector aspects and embodiments), or a cell (or population of cells) as described herein (for example in any of the aforementioned cell (e.g., modified cell) or population of cells aspects and embodiments), for use in the treatment of a cancer, e.g., wherein the cancer is selected from the group consisting of mesothelioma, adenocarcinoma, glioblastoma, colon cancer, rectal cancer, renal-cell carcinoma, liver cancer, non-small cell carcinoma of the lung, cancer of the small intestine, cancer of the esophagus, melanoma, bone cancer, pancreatic cancer, skin cancer, cancer of the head or neck, cutaneous or intraocular malignant melanoma, uterine cancer, ovarian cancer, rectal cancer, cancer of the anal region, stomach cancer, testicular cancer, carcinoma of the fallopian tubes, carcinoma of the endometrium, carcinoma of the cervix, carcinoma of the vagina, carcinoma of the vulva, Hodgkin's Disease, non-Hodgkin's lymphoma, cancer of the endocrine system, cancer of the thyroid gland, cancer of the parathyroid gland, cancer of the adrenal gland, sarcoma of soft tissue, cancer of the urethra, cancer of the penis, solid tumors of childhood, cancer of the bladder, cancer of the kidney or ureter, carcinoma of the renal pelvis, neoplasm of the central nervous system (CNS), primary CNS lymphoma, tumor angiogenesis, spinal axis tumor, brain stem glioma, pituitary adenoma, Kaposi's sarcoma, epidermoid cancer, squamous cell cancer, T-cell lymphoma, environmentally induced cancers, combinations of said cancers, and metastatic lesions of said cancers.

[0330] In addition to the specific features of the invention described above, it is contemplated that the following general features of gRNA molecules, Cas9 molecules and cells are applicable to any aspect and embodiment of the invention described herein, including those aspects and embodiments described above.

[0331] In any of the aspects and embodiments disclosed herein, the gRNA molecule (e.g., the gRNA molecule, or combination of gRNA molecules, including a targeting domain described herein) may include one or more of the following features:

[0332] In certain embodiments, the gRNA molecule (e.g., the gRNA molecule, or one or more gRNA molecules of a combination of gRNA molecules, including a targeting domain described herein) is a dgRNA molecule, wherein the targeting domain and the tracr are disposed on separate nucleic acid molecules. In embodiments, the crRNA includes, from 5′ to 3′, [targeting domain]—:
[0333] a) SEQ ID NO: 6584;
[0334] b) SEQ ID NO: 6585;
[0335] c) SEQ ID NO: 6605;
[0336] d) SEQ ID NO: 6606;
[0337] e) SEQ ID NO: 6607;
[0338] f) SEQ ID NO: 6608; or
[0339] g) SEQ ID NO: 7806. In a preferred embodiment, the crRNA includes, from 5′ to 3′, [targeting domain]-[SEQ ID NO: 6607]. In embodiments, the tracr includes more than 15, e.g., 20 or more, 30 or more, 40 or more, 50 or more, 60 or more, 70 or more, or 80 or more, nucleotides of the S. pyogenes tracr sequence (GUUGGAACCAUUCAAAACAGCAUAGCAAGUUAAAAUAAGGCUAGUCCGUUAUCAACUUG AAAAAGUGGCACCGAGUCGGUGC). In embodiments, the tracr additionally includes 1 or more, e.g., 1, 2, 3, 4, 5, 6, or 7, e.g., preferably 4 or 7, U nucleotides at the 3′ end. In preferred dgRNA embodiments, the tracr includes SEQ ID NO: 7820. In embodiments, the tracr additionally includes 1 or more, e.g., 1, 2, 3, 4, 5, 6, or 7, e.g., preferably 4 or 7, U nucleotides at the 3′ end. In preferred dgRNA embodiments, the tracr includes, e.g., consists of, SEQ ID NO: 6660. In preferred dgRNA embodiments, the crRNA includes, e.g., consists of, [targeting domain]-SEQ ID NO: 6607, and the tracr includes SEQ ID NO: 7820, e.g., includes, e.g., consists of, SEQ ID NO: 6660.

[0340] In other embodiments, the gRNA molecule (e.g., the gRNA molecule, or one or more gRNA molecules of a combination of gRNA molecules, including a targeting domain described herein) is a sgRNA molecule, wherein the targeting domain and the tracr are disposed a single nucleic acid molecule. In embodiments, the sgRNA molecule includes, e.g., consists of: [targeting domain]—
[0341] (a) SEQ ID NO: 6601;
[0342] (b) SEQ ID NO: 6602;
[0343] (c) SEQ ID NO: 6603;
[0344] (d) SEQ ID NO: 6604; or
[0345] (e) any of (a) to (d), above, further including, at the 3′ end, 1, 2, 3, 4, 5, 6 or 7 uracil (U) nucleotides. In a preferred embodiment, the sgRNA molecule includes [targeting domain]-SEQ ID NO: 6601. In a preferred embodiment, the sgRNA molecule includes, e.g., consists of, [targeting domain]-SEQ ID NO: 7811.

[0346] In embodiments, including in any of the aforementioned aspects and embodiments, one or more of the nucleic acid molecules of the gRNA molecule described herein, e.g., all of the nucleic acid molecules of the gRNA molecule described herein, do not include a modification to a nucleotide or internucleotide bond. In other embodiments, including in any of the aforementioned aspects and embodiments, one or more of the nucleic acid molecules of the gRNA molecule described herein include one or more modifications to a nucleotide or internucleotide bond, e.g. as described herein. In embodiments, said modification includes a 2′ O-methyl modification. In embodiments, said modification includes a phosphorothioate modification. In embodiments, said modification includes a 2′ O-methyl modification at each of the 1, 2, 3 or more, e.g., 3, 3′ nucleotides of the nucleic acid of the gRNA molecule. In embodiments, said modification includes a 2′ O-methyl modification at each of the 4^{th}-to-terminal, 3^{rd}-to-terminal, and 2^{nd}-to-terminal 3′ nucleotides of the nucleic acid of the gRNA molecule. In embodiments, said modification includes a 2′ O-methyl modification at each of the 1, 2, 3 or more, e.g., 3, 5′ nucleotides of the nucleic acid of the gRNA molecule. In embodiments, said modification includes a 2′ O-methyl modification at each of the 4^{th}-to-terminal, 3^{rd}-to-terminal, and 2^{nd}-to-terminal 3′ nucleotides of the nucleic acid of the gRNA molecule, and a 2′ O-methyl modification at each of the 1, 2, 3 or more, e.g., 3, 5′ nucleotides of the nucleic acid of the gRNA molecule. In embodiments, said modification includes one or more, e.g., 1, 2, 3, or more, e.g., 3, phosphorothioate bonds at the 3′ end of the nucleic acid molecule of the gRNA. In embodiments, said modification includes one or more, e.g., 1, 2, 3, or more, e.g., 3, phosphorothioate bonds at the 5′ end of the nucleic acid molecule of the gRNA. In embodiments, said modification includes one or more, e.g., 1, 2, 3, or more, e.g., 3, phosphorothioate bonds at the 3′ end and at the 5′ end of the nucleic acid molecule of the gRNA. In embodiments involving a dgRNA molecule, both the molecule including the tracr and the molecule including the crRNA are modified as described herein. In other embodiments involving a dgRNA molecule, the molecule including the tracr is unmodified, and the molecule including the crRNA is modified as described herein. In other embodiments involving a dgRNA molecule, the molecule including the crRNA is unmodified, and the molecule including the tracr is modified as described herein.

[0347] In aspects of the invention that include more than one gRNA molecule, each gRNA molecule can independently be a dgRNA molecule or a sgRNA molecule, e.g., as described herein. In embodiments, all of the gRNA molecules of a combination described herein are dgRNA molecules. In embodiments, all of the gRNA molecules of a combination described herein are sgRNA molecules. In embodiments, one or more of the gRNA molecules of a combination described herein are dgRNA molecules, and one or more of the other gRNA molecules of a combination described herein are sgRNA molecules.

[0348] In embodiments, the gRNA molecule of the invention is a gRNA molecule that produces an indel at or near the target sequence of the gRNA when introduced into a cell described herein. In embodiments, the gRNA molecule of the invention is a gRNA molecule that produces an indel in at least about 70%, e.g., at least about 80%, e.g., at least about 90%, e.g., at least about 95%, e.g., at least about 96%, e.g., at least about 97%, e.g., at least about 98%, e.g., at least about 99%, or more, of the cells, e.g., as described herein, of a population of cells to which the gRNA molecule is introduced. In embodiments, the indel frequency is measured by NGS, e.g., as described herein. In embodiments, said indel or indels are or include frameshift mutations. In embodiments, the gRNA molecule of the invention is a gRNA molecule that produces a frameshift mutation in at least about 30%, e.g., at least about 40%, e.g., at least about 50%, e.g., at least about 60%, e.g., at least about 70%, e.g., at least about 75%, e.g., at least about 80%, e.g., at least about 85%, e.g., at least about 90%, e.g., at least about 95%, or more, of the cells, e.g., as described herein, of a population of cells to which the gRNA molecule is introduced. In embodiments, the frameshift mutation frequency is measured by NGS, e.g., as described herein. In embodiments, said indel, indel frequency, frameshift mutation and/or frameshift mutation frequency is measured in the cell (or population or cells) after introduction of the gRNA molecule as an RNP with a Cas9 molecule described herein. In embodiments, said indel, indel frequency, frameshift mutation and/or frameshift mutation frequency is measured in the cell (or population or cells) after introduction of the gRNA molecule by electroporation.

[0349] In embodiments, the gRNA molecule of the invention is a gRNA molecule that produces an indel at an off-target site with at least a 50-fold, e.g., at least 100-fold, e.g., at least 1000-fold, lower frequency than at or near the target sequence of the gRNA, when introduced into a cell or population of cells described herein. In preferred embodiments, the gRNA does not produce a detectable indel at any off-target site when introduced into a cell or population of cells described herein. In embodiments, the off-target indel analysis is measured by targeted off-target sequencing of predicted off-target binding sites, e.g., as described herein. In embodiments, off-target indel analysis is measured by nucleotide insertional analysis, e.g., as described herein. In embodiments, the off-target analysis is measured in the cell (or population or cells) after introduction of the gRNA molecule as an RNP with a Cas9 molecule described herein. In embodiments, the off-target analysis is measured in the cell (or population or cells) after introduction of the gRNA molecule by electroporation.

[0350] In embodiments, the RNP or combination of RNPs is delivered to the cells by a single electroporation. In embodiments the cells of the invention are subjected to only a single electroporation step.

[0351] In aspects and embodiments of the invention that include a combination of gRNA molecules, each of the gRNA molecules of the combination can independently include any of the aforementioned features.

[0352] In any of the aspects and embodiments disclosed herein, the Cas9 molecule may include one or more of the following features:

[0353] In aspects the Cas9 molecule is an S. pyogenes Cas9, e.g., a modified or unmodified S. pyogenes Cas9 molecule as described herein. In embodiments, the Cas9 molecule includes SEQ ID NO: 6611. In other embodiments, the Cas9 molecule includes, e.g., consists of, SEQ ID NO: 7821. In other embodiments, the Cas9 molecule includes, e.g., consists of, SEQ ID NO: 7822. In other embodiments, the Cas9 molecule includes, e.g., consists of, SEQ ID NO: 7823. In other embodiments, the Cas9 molecule includes, e.g., consists of, SEQ ID NO: 7824. In other embodiments, the Cas9 molecule includes, e.g., consists of, SEQ ID NO: 7825. In other embodiments, the Cas9 molecule includes, e.g., consists of, SEQ ID NO: 7826. In other embodiments, the Cas9 molecule includes, e.g., consists of, SEQ ID NO: 7827. In other embodiments, the Cas9 molecule includes, e.g., consists of, SEQ ID NO: 7828. In other embodiments, the Cas9 molecule includes, e.g., consists of, SEQ ID NO: 7829. In other embodiments, the Cas9 molecule includes, e.g., consists of, SEQ ID NO: 7830. In other embodiments, the Cas9 molecule includes, e.g., consists of, SEQ ID NO: 7831. Preferred Cas9 molecules are Cas9 molecules that include, e.g., consist of, SEQ ID NO: 7821, SEQ ID NO: 7822, SEQ ID NO: 7825 and SEQ ID NO: 7828.

[0354] In aspects and embodiments that include one or more RNP complexes, e.g., one or more RNP complexes that include a Cas9 molecule described herein, each of said RNP complexes is at a concentration of less than about 10 uM, e.g., less than about 3 uM, e.g., less than about 1 uM, e.g., less than about 0.5 uM, e.g., less than about 0.3 uM, e.g., less than about 0.1 uM. In embodiments, said concentration is the concentration of the RNP complex in the composition including the cell (e.g., population of cells), e.g., as described herein, to which the RNP is to be introduced, e.g., as described herein, e.g., by electroporation. In embodiments, the media of the composition is suitable for electroporation.

[0355] In aspects and embodiments of the invention that include a combination of gRNA molecules, for example a combination of RNPs that include different gRNA molecules, each of the Cas9 molecules of the combination can independently include any of the aforementioned features.

[0356] In any of the aspects and embodiments disclosed herein, the cell (e.g., population of cells) may include one or more of the following features:

[0357] In aspects, the cell (e.g., population of cells) includes one or more cells that have reduced or eliminated expression of a component of the T-cell receptor (TCR). In embodiments, the reduced or eliminated expression of a component of the T-cell receptor (TCR) includes reduced or eliminated expression of TRAC. In embodiments, the reduced or eliminated expression of a component of the T-cell receptor (TCR) includes reduced or eliminated expression of TRBC1. In embodiments, the reduced or eliminated expression of a component of the T-cell receptor (TCR) includes reduced or eliminated expression of TRBC2. In embodiments, the reduced or eliminated expression of a component of the T-cell receptor (TCR) includes reduced or eliminated expression of CD3G. In embodiments, the reduced or eliminated expression of a component of the T-cell receptor (TCR) includes reduced or eliminated expression of CD3D. In embodiments, the reduced or eliminated expression of a component of the T-cell receptor (TCR) includes reduced or eliminated expression of CD3 E. In embodiments, said reduced or eliminated expression of said component of the TCR is the result of introduction of one or more, e.g., one or two, e.g., one gRNA molecule described herein to said component of the TCR into said cell. In embodiments, the cell includes an indel, e.g., a frameshift mutation, e.g., as described herein, at or near the target sequence of a targeting domain of a gRNA molecule to said component of the TCR. In embodiments, the population of cells includes at least about 50%, e.g., at least about 60%, e.g., at least about 70%, e.g., at least about 80%, e.g., at least about 90% or more cells (as described herein) which exhibit reduced or eliminated expression of a component of the TCR. In embodiments, said reduced or eliminated expression of a component of the TCR is as measured by flow cytometry, e.g., as described herein.

[0358] In aspects, (including either alternatively, or in addition to, the reduced or eliminated expression of a component of the TCR) the cell (e.g., population of cells) includes one or more cells that have reduced or eliminated expression of beta-2 microglobulin (B2M). In embodiments, said reduced or eliminated expression of said B2M is the result of introduction of one or more, e.g., one or two, e.g., one gRNA molecule described herein to B2M into said cell. In embodiments, the cell includes an indel, e.g., a frameshift mutation, e.g., as described herein, at or near the target sequence of a targeting domain of a gRNA molecule to said B2M. In embodiments, the population of cells includes at least about 50%, e.g., at least about 60%, e.g., at least about 70%, e.g., at least about 80%, e.g., at least about 90% or more cells (as described herein) which exhibit reduced or eliminated expression of B2M. In embodiments, said reduced or eliminated expression of B2M is as measured by flow cytometry, e.g., as described herein.

[0359] In aspects, (including either alternatively, or in addition to, the reduced or eliminated expression of a component of the TCR and/or B2M) the cell (e.g., population of cells) includes one or more cells that have reduced or eliminated expression of CIITA. In embodiments, said reduced or eliminated expression of said CIITA is the result of introduction of one or more, e.g., one or two, e.g., one gRNA molecule to said CIITA described herein into said cell. In embodiments, the cell includes an indel, e.g., a frameshift mutation, e.g., as described herein, at or near the target sequence of a targeting domain of a gRNA molecule to said CIITA. In embodiments, the population of cells includes at least about 50%, e.g., at least about 60%, e.g., at least about 70%, e.g., at least about 80%, e.g., at least about 90% or more cells (as described herein) which exhibit reduced or eliminated expression of CIITA. In embodiments, said reduced or eliminated expression of B2M is as measured by flow cytometry, e.g., as described herein.

[0360] In aspects, (including either alternatively, or in addition to, the reduced or eliminated expression of a component of the TCR) the cell (e.g., population of cells) includes one or more cells that have reduced or eliminated expression of a target of an immunosuppressant, e.g., FKBP1A. In embodiments, said reduced or eliminated expression of said FKBP1A is the result of introduction of one or more, e.g., one or two, e.g., one, gRNA molecule described herein to said FKBP1A into said cell. In embodiments, the cell includes an indel, e.g., a frameshift mutation, e.g., as described herein, at or near the target sequence of a targeting domain of a gRNA molecule to said FKBP1A. In embodiments, the population of cells includes at least about 50%, e.g., at least about 60%, e.g., at least about 70%, e.g., at least about 80%, e.g., at least about 90% or more cells (as described herein) which exhibit reduced or eliminated expression of FKBP1A. In embodiments, said reduced or eliminated expression of FKBP1A is as measured by flow cytometry, e.g., as described herein.

[0361] In some aspects, it is desired that the cell exhibits reduced or eliminated expression of more than one gene. In an aspect, the cell exhibits reduced or eliminated expression of a component of the TCR (e.g., TRAC, TRBC1, TRBC2, CD3 E, CD3G, and/or CD3D), reduced or eliminated expression of B2M, and reduced or eliminated expression of CIITA. In embodiments, the reduced or eliminated expression results from introduction into the cell a combination of gRNA molecules, wherein the gRNA molecules of the combination include the targeting domain sequences listed in any of combinations A1 to A72. In embodiments, the reduced or eliminated expression results from introduction into the cell a combination of gRNA molecules, wherein the gRNA molecules of the combination include the targeting domain sequences listed in any of combinations B1 to B84. In embodiments, said cell includes an indel, e.g., a frameshift mutation, at or near the target sequences of each of the gRNA molecule targeting domains listed in Table 33, Table 34 or Table 38 (e.g., the gRNA molecules in any of combinations A1 to A72, B1 to B84, or F1 to F60).

[0362] In some aspects, it is desired that the cell exhibits reduced or eliminated expression of more than one gene. In an aspect, the cell exhibits reduced or eliminated expression of a component of the TCR (e.g., TRAC, TRBC1, TRBC2, CD3 E, CD3G, and/or CD3D), and reduced or eliminated expression of a target of an immunosuppressant, e.g., FKBP1A. In embodiments, the reduced or eliminated expression results from introduction into the cell a combination of gRNA molecules, wherein the gRNA molecules of the combination include the targeting domain sequences listed in any of combinations C1 to C42. In embodiments, the reduced or eliminated expression results from introduction into the cell a combination of gRNA molecules, wherein the gRNA molecules of the combination include the targeting domain sequences listed in any of combinations D1 to D36. In embodiments, said cell includes an indel, e.g., a frameshift mutation, at or near the target sequences of each of the gRNA molecule targeting domains listed in Table 35, Table 36 or Table 37 (e.g., the gRNA molecules in any of combinations C1 to C42, D1 to D36, or E1 to E30).

[0363] In preferred embodiments in which it is intended to reduce or eliminate expression of both a component of the T cell receptor, e.g., TRAC, and B2M (including embodiments when expression or function of an additional target, e.g., more than one additional target, e.g., CIITA, is also reduced or eliminated), the gRNA molecule which targets TRAC is selected from SEQ ID NO: 7833, SEQ ID NO: 7834, SEQ ID NO: 7835, a dgRNA comprising, e.g., consisting of, SEQ ID NO: 7836 and SEQ ID NO: 6660, a dgRNA comprising, e.g., consisting of, SEQ ID NO: 7837 and SEQ ID NO: 6660, a dgRNA comprising, e.g., consisting of, SEQ ID NO: 7836 and SEQ ID NO: 10798, and a dgRNA comprising, e.g., consisting of, SEQ ID NO: 7837 and SEQ ID NO: 10798, and the gRNA molecule which targets B2M is selected from SEQ ID NO: 7853, SEQ ID NO: 7854, SEQ ID NO: 7855, a dgRNA comprising, e.g., consisting of, SEQ ID NO: 7856 and SEQ ID NO: 6660, a dgRNA comprising, e.g., consisting of, SEQ ID NO: 7857 and SEQ ID NO: 6660, a dgRNA comprising, e.g., consisting of, SEQ ID NO: 7856 and SEQ ID NO: 10798, and a dgRNA comprising, e.g., consisting of, SEQ ID NO: 7857 and SEQ ID NO: 10798. As described herein, in embodiments of any of the combinations, each of said gRNA molecules is provided as an RNP with a Cas9 molecule, e.g., a Cas9 molecule described herein.

[0364] In preferred embodiments in which it is intended to reduce or eliminate expression of both a component of the T cell receptor, e.g., TRAC, and B2M (including embodiments when expression or function of an additional target, e.g., more than one additional target, e.g., CIITA, is also reduced or eliminated), the gRNA molecule which targets TRAC is selected from SEQ ID NO: 7833, SEQ ID NO: 7834, SEQ ID NO: 7835, a dgRNA comprising, e.g., consisting of, SEQ ID NO: 7836 and SEQ ID NO: 6660, a dgRNA comprising, e.g., consisting of, SEQ ID NO: 7837 and SEQ ID NO: 6660, a dgRNA comprising, e.g., consisting of, SEQ ID NO: 7836 and SEQ ID NO: 10798, and a dgRNA comprising, e.g., consisting of, SEQ ID NO: 7837 and SEQ ID NO: 10798, and the gRNA molecule which targets B2M is selected from SEQ ID NO: 7858, SEQ ID NO: 7859, SEQ ID NO: 7860, a dgRNA comprising, e.g., consisting of, SEQ ID NO: 7861 and SEQ ID NO: 6660, a dgRNA comprising, e.g., consisting of, SEQ ID NO: 7862 and SEQ ID NO: 6660, a dgRNA comprising, e.g., consisting of, SEQ ID NO: 7861 and SEQ ID NO: 10798, and a dgRNA comprising, e.g., consisting of, SEQ ID NO: 7862 and SEQ ID NO: 10798. As described herein, in embodiments of any of the combinations, each of said gRNA molecules is provided as an RNP with a Cas9 molecule, e.g., a Cas9 molecule described herein.

[0365] In preferred embodiments in which it is intended to reduce or eliminate expression of both a component of the T cell receptor, e.g., TRAC, and B2M (including embodiments when expression or function of an additional target, e.g., more than one additional target, e.g., CIITA, is also reduced or eliminated), the gRNA molecule which targets TRAC is selected from SEQ ID NO: 7838, SEQ ID NO: 7839, SEQ ID NO: 7840, a dgRNA comprising, e.g., consisting of, SEQ ID NO: 7841 and SEQ ID NO: 6660, a dgRNA comprising, e.g., consisting of, SEQ ID NO: 7842 and SEQ ID NO: 6660, a dgRNA comprising, e.g., consisting of, SEQ ID NO: 7841 and SEQ ID NO: 10798, and a dgRNA comprising, e.g., consisting of, SEQ ID NO: 7842 and SEQ ID NO: 10798, and the gRNA molecule which targets B2M is selected from SEQ ID NO: 7853, SEQ ID NO: 7854, SEQ ID NO: 7855, a dgRNA comprising, e.g., consisting of, SEQ ID NO: 7856 and SEQ ID NO: 6660, a dgRNA comprising, e.g., consisting of, SEQ ID NO: 7857 and SEQ ID NO: 6660, a dgRNA comprising, e.g., consisting of, SEQ ID NO: 7856 and SEQ ID NO: 10798, and a dgRNA comprising, e.g., consisting of, SEQ ID NO: 7857 and SEQ ID NO: 10798. As described herein, in embodiments of any of the combinations, each of said gRNA molecules is provided as an RNP with a Cas9 molecule, e.g., a Cas9 molecule described herein.

[0366] In preferred embodiments in which it is intended to reduce or eliminate expression of both a component of the T cell receptor, e.g., TRAC, and B2M (including embodiments when expression or function of an additional target, e.g., more than one additional target, e.g., CIITA, is also reduced or eliminated), the gRNA molecule which targets TRAC is selected from SEQ ID NO: 7838, SEQ ID NO: 7839, SEQ ID NO: 7840, a dgRNA comprising, e.g., consisting of, SEQ ID NO: 7841 and SEQ ID NO: 6660, a dgRNA comprising, e.g., consisting of, SEQ ID NO: 7842 and SEQ ID NO: 6660, a dgRNA comprising, e.g., consisting of, SEQ ID NO: 7841 and SEQ ID NO: 10798, and a dgRNA comprising, e.g., consisting of, SEQ ID NO: 7842 and SEQ ID NO: 10798, and the gRNA molecule which targets B2M is selected from SEQ ID NO: 7858, SEQ ID NO: 7859, SEQ ID NO: 7860, a dgRNA comprising, e.g., consisting of, SEQ ID NO: 7861 and SEQ ID NO: 6660, a dgRNA comprising, e.g., consisting of, SEQ ID NO: 7862 and SEQ ID NO: 6660, a dgRNA comprising, e.g., consisting of, SEQ ID NO: 7861 and SEQ ID NO: 10798, and a dgRNA comprising, e.g., consisting of, SEQ ID NO: 7862 and SEQ ID NO: 10798. As described herein, in embodiments of any of the combinations, each of said gRNA molecules is provided as an RNP with a Cas9 molecule, e.g., a Cas9 molecule described herein.

[0367] In preferred embodiments in which it is intended to reduce or eliminate expression of both a component of the T cell receptor, e.g., TRBC, and B2M (including embodiments when expression or function of an additional target, e.g., more than one additional target, e.g., CIITA, is also reduced or eliminated), the gRNA molecule which targets TRBC is selected from SEQ ID NO: 7843, SEQ ID NO: 7844, SEQ ID NO: 7845, a dgRNA comprising, e.g., consisting of, SEQ ID NO: 7846 and SEQ ID NO: 6660, a dgRNA comprising, e.g., consisting of, SEQ ID NO: 7847 and SEQ ID NO: 6660, a dgRNA comprising, e.g., consisting of, SEQ ID NO: 7846 and SEQ ID NO: 10798, and a dgRNA comprising, e.g., consisting of, SEQ ID NO: 7847 and SEQ ID NO: 10798, and the gRNA molecule which targets B2M is selected from SEQ ID NO: 7853, SEQ ID NO: 7854, SEQ ID NO: 7855, a dgRNA comprising, e.g., consisting of, SEQ ID NO: 7856 and SEQ ID NO: 6660, a dgRNA comprising, e.g., consisting of, SEQ ID NO: 7857 and SEQ ID NO: 6660, a dgRNA comprising, e.g., consisting of, SEQ ID NO: 7856 and SEQ ID NO: 10798, and a dgRNA comprising, e.g., consisting of, SEQ ID NO: 7857 and SEQ ID NO: 10798. As described herein, in embodiments of any of the combinations, each of said gRNA molecules is provided as an RNP with a Cas9 molecule, e.g., a Cas9 molecule described herein.

[0368] In preferred embodiments in which it is intended to reduce or eliminate expression of both a component of the T cell receptor, e.g., TRBC, and B2M (including embodiments when expression or function of an additional target, e.g., more than one additional target, e.g., CIITA, is also reduced or eliminated), the gRNA molecule which targets TRBC is selected from SEQ ID NO: 7843, SEQ ID NO: 7844, SEQ ID NO: 7845, a dgRNA comprising, e.g., consisting of, SEQ ID NO: 7846 and SEQ ID NO: 6660, a dgRNA comprising, e.g., consisting of, SEQ ID NO: 7847 and SEQ ID NO: 6660, a dgRNA comprising, e.g., consisting of, SEQ ID NO: 7846 and SEQ ID NO: 10798, and a dgRNA comprising, e.g., consisting of, SEQ ID NO: 7847 and SEQ ID NO: 10798, and the gRNA molecule which targets B2M is selected from SEQ ID NO: 7858, SEQ ID NO: 7859, SEQ ID NO: 7860, a dgRNA comprising, e.g., consisting of, SEQ ID NO: 7861 and SEQ ID NO: 6660, a dgRNA comprising, e.g., consisting of, SEQ ID NO: 7862 and SEQ ID NO: 6660, a dgRNA comprising, e.g., consisting of, SEQ ID NO: 7861 and SEQ ID NO: 10798, and a dgRNA comprising, e.g., consisting of, SEQ ID NO: 7862 and SEQ ID NO: 10798. As described herein, in embodiments of any of the combinations, each of said gRNA molecules is provided as an RNP with a Cas9 molecule, e.g., a Cas9 molecule described herein.

[0369] In preferred embodiments in which it is intended to reduce or eliminate expression of both a component of the T cell receptor, e.g., TRBC, and B2M (including embodiments when expression or function of an additional target, e.g., more than one additional target, e.g., CIITA, is also reduced or eliminated), the gRNA molecule which targets TRBC is selected from SEQ ID NO: 7848, SEQ ID NO: 7849, SEQ ID NO: 7850, a dgRNA comprising, e.g., consisting of, SEQ ID NO: 7851 and SEQ ID NO: 6660, a dgRNA comprising, e.g., consisting of, SEQ ID NO: 7852 and SEQ ID NO: 6660, a dgRNA comprising, e.g., consisting of, SEQ ID NO: 7851 and SEQ ID NO: 10798, and a dgRNA comprising, e.g., consisting of, SEQ ID NO: 7852 and SEQ ID NO: 10798, and the gRNA molecule which targets B2M is selected from SEQ ID NO: 7853, SEQ ID NO: 7854, SEQ ID NO: 7855, a dgRNA comprising, e.g., consisting of, SEQ ID NO: 7856 and SEQ ID NO: 6660, a dgRNA comprising, e.g., consisting of, SEQ ID NO: 7857 and SEQ ID NO: 6660, a dgRNA comprising, e.g., consisting of, SEQ ID NO: 7856 and SEQ ID NO: 10798, and a dgRNA comprising, e.g., consisting of, SEQ ID NO: 7857 and SEQ ID NO: 10798. As described herein, in embodiments of any of the combinations, each of said gRNA molecules is provided as an RNP with a Cas9 molecule, e.g., a Cas9 molecule described herein.

[0370] In preferred embodiments in which it is intended to reduce or eliminate expression of both a component of the T cell receptor, e.g., TRBC, and B2M (including embodiments when expression or function of an additional target, e.g., more than one additional target, e.g., CIITA, is also reduced or eliminated), the gRNA molecule which targets TRBC is selected from SEQ ID NO: 7848, SEQ ID NO: 7849, SEQ ID NO: 7850, a dgRNA comprising, e.g., consisting of, SEQ ID NO: 7851 and SEQ ID NO: 6660, a dgRNA comprising, e.g., consisting of, SEQ ID NO: 7852 and SEQ ID NO: 6660, a dgRNA comprising, e.g., consisting of, SEQ ID NO: 7851 and SEQ ID NO: 10798, and a dgRNA comprising, e.g., consisting of, SEQ ID NO: 7852 and SEQ ID NO: 10798, and the gRNA molecule which targets B2M is selected from SEQ ID NO: 7858, SEQ ID NO: 7859, SEQ ID NO: 7860, a dgRNA comprising, e.g., consisting of, SEQ ID NO: 7861 and SEQ ID NO: 6660, a dgRNA comprising, e.g., consisting of, SEQ ID NO: 7862 and SEQ ID NO: 6660, a dgRNA comprising, e.g., consisting of, SEQ ID NO: 7861 and SEQ ID NO: 10798, and a dgRNA comprising, e.g., consisting of, SEQ ID NO: 7862 and SEQ ID NO: 10798. As described herein, in embodiments of any of the combinations, each of said gRNA molecules is provided as an RNP with a Cas9 molecule, e.g., a Cas9 molecule described herein.

[0371] In preferred embodiments in which it is intended to reduce or eliminate expression of both a component of the T cell receptor, e.g., TRAC, and FKBP1A (including embodiments when expression or function of an additional target, e.g., more than one additional target, is also reduced or eliminated), the gRNA molecule which targets TRAC is selected from SEQ ID NO: 7833, SEQ ID NO: 7834, SEQ ID NO: 7835, a dgRNA comprising, e.g., consisting of, SEQ ID NO: 7836 and SEQ ID NO: 6660, a dgRNA comprising, e.g., consisting of, SEQ ID NO: 7837 and SEQ ID NO: 6660, a dgRNA comprising, e.g., consisting of, SEQ ID NO: 7836 and SEQ ID NO: 10798, and a dgRNA comprising, e.g., consisting of, SEQ ID NO: 7837 and SEQ ID NO: 10798, and the gRNA molecule which targets FKBP1A is selected from SEQ ID NO: 7863, SEQ ID NO: 7864, SEQ ID NO: 7865, a dgRNA comprising, e.g., consisting of, SEQ ID NO: 7866 and SEQ ID NO: 6660, a dgRNA comprising, e.g., consisting of, SEQ ID NO: 7867 and SEQ ID NO: 6660, a dgRNA comprising, e.g., consisting of, SEQ ID NO: 7866 and SEQ ID NO: 10798, and a dgRNA comprising, e.g., consisting of, SEQ ID NO: 7867 and SEQ ID NO: 10798. As described herein, in embodiments of any of the combinations, each of said gRNA molecules is provided as an RNP with a Cas9 molecule, e.g., a Cas9 molecule described herein.

[0372] In preferred embodiments in which it is intended to reduce or eliminate expression of both a component of the T cell receptor, e.g., TRAC, and FKBP1A (including embodiments when expression or function of an additional target, e.g., more than one additional target, is also reduced or eliminated), the gRNA molecule which targets TRAC is selected from SEQ ID NO: 7833, SEQ ID NO: 7834, SEQ ID NO: 7835, a dgRNA comprising, e.g., consisting of, SEQ ID NO: 7836 and SEQ ID NO: 6660, a dgRNA comprising, e.g., consisting of, SEQ ID NO: 7837 and SEQ ID NO: 6660, a dgRNA comprising, e.g., consisting of, SEQ ID NO: 7836 and SEQ ID NO: 10798, and a dgRNA comprising, e.g., consisting of, SEQ ID NO: 7837 and SEQ ID NO: 10798, and the gRNA molecule which targets FKBP1A is selected from SEQ ID NO: 7868, SEQ ID NO: 7869, SEQ ID NO: 7870, a dgRNA comprising, e.g., consisting of, SEQ ID NO: 7871 and SEQ ID NO: 6660, a dgRNA comprising, e.g., consisting of, SEQ ID NO: 7872 and SEQ ID NO: 6660, a dgRNA comprising, e.g., consisting of, SEQ ID NO: 7871 and SEQ ID NO: 10798, and a dgRNA comprising, e.g., consisting of, SEQ ID NO: 7872 and SEQ ID NO: 10798. As described herein, in embodiments of any of the combinations, each of said gRNA molecules is provided as an RNP with a Cas9 molecule, e.g., a Cas9 molecule described herein.

[0373] In preferred embodiments in which it is intended to reduce or eliminate expression of both a component of the T cell receptor, e.g., TRAC, and FKBP1A (including embodiments when expression or function of an additional target, e.g., more than one additional target, is also reduced or eliminated), the gRNA molecule which targets TRAC is selected from SEQ ID NO: 7838, SEQ ID NO: 7839, SEQ ID NO: 7840, a dgRNA comprising, e.g., consisting of, SEQ ID NO: 7841 and SEQ ID NO: 6660, a dgRNA comprising, e.g., consisting of, SEQ ID NO: 7842 and SEQ ID NO: 6660, a dgRNA comprising, e.g., consisting of, SEQ ID NO: 7841 and SEQ ID NO: 10798, and a dgRNA comprising, e.g., consisting of, SEQ ID NO: 7842 and SEQ ID NO: 10798, and the gRNA molecule which targets FKBP1A is selected from SEQ ID NO: 7863, SEQ ID NO: 7864, SEQ ID NO: 7865, a dgRNA comprising, e.g., consisting of, SEQ ID NO: 7866 and SEQ ID NO: 6660, a dgRNA comprising, e.g., consisting of, SEQ ID NO: 7867 and SEQ ID NO: 6660, a dgRNA comprising, e.g., consisting of, SEQ ID NO: 7866 and SEQ ID NO: 10798, and a dgRNA comprising, e.g., consisting of, SEQ ID NO: 7867 and SEQ ID NO: 10798. As described herein, in embodiments of any of the combinations, each of said gRNA molecules is provided as an RNP with a Cas9 molecule, e.g., a Cas9 molecule described herein.

[0374] In preferred embodiments in which it is intended to reduce or eliminate expression of both a component of the T cell receptor, e.g., TRAC, and FKBP1A (including embodiments when expression or function of an additional target, e.g., more than one additional target, is also reduced or eliminated), the gRNA molecule which targets TRAC is selected from SEQ ID NO: 7838, SEQ ID NO: 7839, SEQ ID NO: 7840, a dgRNA comprising, e.g., consisting of, SEQ ID NO: 7841 and SEQ ID NO: 6660, a dgRNA comprising, e.g., consisting of, SEQ ID NO: 7842 and SEQ ID NO: 6660, a dgRNA comprising, e.g., consisting of, SEQ ID NO: 7841 and SEQ ID NO: 10798, and a dgRNA comprising, e.g., consisting of, SEQ ID NO: 7842 and SEQ ID NO: 10798, and the gRNA molecule which targets FKBP1A is selected from SEQ ID NO: 7868, SEQ ID NO: 7869, SEQ ID NO: 7870, a dgRNA comprising, e.g., consisting of, SEQ ID NO: 7871 and SEQ ID NO: 6660, a dgRNA comprising, e.g., consisting of, SEQ ID NO: 7872 and SEQ ID NO: 6660, a dgRNA comprising, e.g., consisting of, SEQ ID NO: 7871 and SEQ ID NO: 10798, and a dgRNA comprising, e.g., consisting of, SEQ ID NO: 7872 and SEQ ID NO: 10798. As described herein, in embodiments of any of the combinations, each of said gRNA molecules is provided as an RNP with a Cas9 molecule, e.g., a Cas9 molecule described herein.

[0375] In preferred embodiments in which it is intended to reduce or eliminate expression of both a component of the T cell receptor, e.g., TRBC, and FKBP1A (including embodiments when expression or function of an additional target, e.g., more than one additional target, is also reduced or eliminated), the gRNA molecule which targets TRBC is selected from SEQ ID NO: 7843, SEQ ID NO: 7844, SEQ ID NO: 7845, a dgRNA comprising, e.g., consisting of, SEQ ID NO: 7846 and SEQ ID NO: 6660, a dgRNA comprising, e.g., consisting of, SEQ ID NO: 7847 and SEQ ID NO: 6660, a dgRNA comprising, e.g., consisting of, SEQ ID NO: 7846 and SEQ ID NO: 10798, and a dgRNA comprising, e.g., consisting of, SEQ ID NO: 7847 and SEQ ID NO: 10798, and the gRNA molecule which targets FKBP1A is selected from SEQ ID NO: 7863, SEQ ID NO: 7864, SEQ ID NO: 7865, a dgRNA comprising, e.g., consisting of, SEQ ID NO: 7866 and SEQ ID NO: 6660, a dgRNA comprising, e.g., consisting of, SEQ ID NO: 7867 and SEQ ID NO: 6660, a dgRNA comprising, e.g., consisting of, SEQ ID NO: 7866 and SEQ ID NO: 10798, and a dgRNA comprising, e.g., consisting of, SEQ ID NO: 7867 and SEQ ID NO: 10798. As described herein, in embodiments of any of the combinations, each of said gRNA molecules is provided as an RNP with a Cas9 molecule, e.g., a Cas9 molecule described herein.

[0376] In preferred embodiments in which it is intended to reduce or eliminate expression of both a component of the T cell receptor, e.g., TRBC, and FKBP1A (including embodiments when expression or function of an additional target, e.g., more than one additional target, is also reduced or eliminated), the gRNA molecule which targets TRBC is selected from SEQ ID NO: 7843, SEQ ID NO: 7844, SEQ ID NO: 7845, a dgRNA comprising, e.g., consisting of, SEQ ID NO: 7846 and SEQ ID NO: 6660, a dgRNA comprising, e.g., consisting of, SEQ ID NO: 7847 and SEQ ID NO: 6660, a dgRNA comprising, e.g., consisting of, SEQ ID NO: 7846 and SEQ ID NO: 10798, and a dgRNA comprising, e.g., consisting of, SEQ ID NO: 7847 and SEQ ID NO: 10798, and the gRNA molecule which targets FKBP1A is selected from SEQ ID NO: 7868, SEQ ID NO: 7869, SEQ ID NO: 7870, a dgRNA comprising, e.g., consisting of, SEQ ID NO: 7871 and SEQ ID NO: 6660, a dgRNA comprising, e.g., consisting of, SEQ ID NO: 7872 and SEQ ID NO: 6660, a dgRNA comprising, e.g., consisting of, SEQ ID NO: 7871 and SEQ ID NO: 10798, and a dgRNA comprising, e.g., consisting of, SEQ ID NO: 7872 and SEQ ID NO: 10798. As described herein, in embodiments of any of the combinations, each of said gRNA molecules is provided as an RNP with a Cas9 molecule, e.g., a Cas9 molecule described herein.

[0377] In preferred embodiments in which it is intended to reduce or eliminate expression of both a component of the T cell receptor, e.g., TRBC, and FKBP1A (including embodiments when expression or function of an additional target, e.g., more than one additional target, is also reduced or eliminated), the gRNA molecule which targets TRBC is selected from SEQ ID NO: 7848, SEQ ID NO: 7849, SEQ ID NO: 7850, a dgRNA comprising, e.g., consisting of, SEQ ID NO: 7851 and SEQ ID NO: 6660, a dgRNA comprising, e.g., consisting of, SEQ ID NO: 7852 and SEQ ID NO: 6660, a dgRNA comprising, e.g., consisting of, SEQ ID NO: 7851 and SEQ ID NO: 10798, and a dgRNA comprising, e.g., consisting of, SEQ ID NO: 7852 and SEQ ID NO: 10798, and the gRNA molecule which targets FKBP1A is selected from SEQ ID NO: 7863, SEQ ID NO: 7864, SEQ ID NO: 7865, a dgRNA comprising, e.g., consisting of, SEQ ID NO: 7866 and SEQ ID NO: 6660, a dgRNA comprising, e.g., consisting of, SEQ ID NO: 7867 and SEQ ID NO: 6660, a dgRNA comprising, e.g., consisting of, SEQ ID NO: 7866 and SEQ ID NO: 10798, and a dgRNA comprising, e.g., consisting of, SEQ ID NO: 7867 and SEQ ID NO: 10798. As described herein, in embodiments of any of the combinations, each of said gRNA molecules is provided as an RNP with a Cas9 molecule, e.g., a Cas9 molecule described herein.

[0378] In preferred embodiments in which it is intended to reduce or eliminate expression of both a component of the T cell receptor, e.g., TRBC, and FKBP1A (including embodiments when expression or function of an additional target, e.g., more than one additional target, is also reduced or eliminated), the gRNA molecule which targets TRBC is selected from SEQ ID NO: 7848, SEQ ID NO: 7849, SEQ ID NO: 7850, a dgRNA comprising, e.g., consisting of, SEQ ID NO: 7851 and SEQ ID NO: 6660, a dgRNA comprising, e.g., consisting of, SEQ ID NO: 7852 and SEQ ID NO: 6660, a dgRNA comprising, e.g., consisting of, SEQ ID NO: 7851 and SEQ ID NO: 10798, and a dgRNA comprising, e.g., consisting of, SEQ ID NO: 7852 and SEQ ID NO: 10798, and the gRNA molecule which targets FKBP1A is selected from SEQ ID NO: 7868, SEQ ID NO: 7869, SEQ ID NO: 7870, a dgRNA comprising, e.g., consisting of, SEQ ID NO: 7871 and SEQ ID NO: 6660, a dgRNA comprising, e.g., consisting of, SEQ ID NO: 7872 and SEQ ID NO: 6660, a dgRNA comprising, e.g., consisting of, SEQ ID NO: 7871 and SEQ ID NO: 10798, and a dgRNA comprising, e.g., consisting of, SEQ ID NO: 7872 and SEQ ID NO: 10798. As described herein, in embodiments of any of the combinations, each of said gRNA molecules is provided as an RNP with a Cas9 molecule, e.g., a Cas9 molecule described herein.

[0379] In one aspect, the cell exhibits reduced or eliminated expression of only one component of the TCR (though it may exhibit reduced or eliminated expression of one or more other targets which are not a component of the TCR). In embodiments, the cell comprises an indel at or near a target sequence within only a single gene (or its regulatory elements) that is a component of the TCR (though the cell may comprise an indel at or near a target sequence within one or more additional genes (or its regulatory elements) which are not a component of the TCR). Thus, in embodiments, the cell does not comprise an indel within more than one gene that is a component of a TCR. In embodiments, the cell does not comprise an indel within TRAC and within a gene encoding a second component of the TCR, e.g., TRBC1 or TRBC2.

[0380] In one aspect, the cell does not exhibit reduced or eliminated expression of a gene comprising a target sequence of an inhibitory molecule or downstream effector of signaling through an inhibitory molecule (though it may exhibit reduced or eliminated expression of one or more other genes). In embodiments, the cell does not include an indel at or near a target sequence in a gene (or its regulatory elements) of an inhibitory molecule or downstream effector of signaling through an inhibitory molecule (though it may include an indel at one or more other genes (or its regulatory elements)). In embodiments, the cell does not comprise an indel within PDCD1 or its regulatory elements.

[0381] In aspects, the cell is an animal cell, for example, a mammalian, primate, or human cell, e.g., a human cell. In aspects, the cell is an immune effector cell (e.g., a population of cells including one or more immune effector cells), for example, a T cell or NK cell, for example a T cell, for example a CD4+ T cell, a CD8+ T cell, or a combination thereof.

[0382] In aspects, the cell the cell is autologous with respect to a patient to be administered said cell. In other aspects, the cell is allogeneic with respect to a patient to be administered said cell. In embodiments, the cell is allogeneic with respect to a patient to be administered said cell, and is an induced pluripotent stem cell or is a cell derived therefrom. In embodiments, the cell is allogeneic with respect to a patient to be administered said cell, and is an immune effector cell, e.g., a T cell, isolated from a healthy human donor.

[0383] In aspects, a cell (or population of cells), e.g., as described herein, e.g., a CAR-expressing cell as described herein, is modified and/or altered, e.g., by the methods described herein, ex vivo. In other aspects, a cell (or population of cells), e.g., as described herein, e.g., a CAR-expressing cell as described herein, is modified and/or altered, e.g., by the methods described herein, in vivo. In aspects, the CRISPR systems, gRNA molecules (including in an RNP complex with a Cas9 molecule as described herein) and/or compositions (e.g., compositions comprising more than one gRNA molecule of the invention) of the invention are introduced into a cell, e.g., as described herein, e.g., a CAR-expressing cell as described herein, ex vivo. In other aspects, the CRISPR systems, gRNA molecules (including in an RNP complex with a Cas9 molecule as described herein) and/or compositions (e.g., compositions comprising more than one gRNA molecule of the invention) of the invention are introduced into a cell, e.g., as described herein, e.g., a CAR-expressing cell as described herein, in vivo.

[0384] In aspects, the cell has been, is, or will be, engineered to express a chimeric antigen receptor (CAR), as described herein (for example, the cell includes, or will include, nucleic acid sequence encoding a CAR). In embodiments, the CAR recognizes an antigen selected from: CD19; CD123; CD22; CD30; CD171; CS-1 (also referred to as CD2 subset 1, CRACC, SLAMF7, CD319, and 19A24); C-type lectin-like molecule-1 (CLL-1 or CLECL1); CD33; epidermal growth factor receptor variant III (EGFRvIII); ganglioside G2 (GD2); ganglioside GD3 (aNeu5Ac(2-8)aNeu5Ac(2-3)bDGalp(1-4)bDGlcp(1-1)Cer); TNF receptor family member B cell maturation (BCMA); Tn antigen ((Tn Ag) or (GalNAcα-Ser/Thr)); prostate-specific membrane antigen (PSMA); Receptor tyrosine kinase-like orphan receptor 1 (ROR1); Fms-Like Tyrosine Kinase 3 (FLT3); Tumor-associated glycoprotein 72 (TAG72); CD38; CD44v6; Carcinoembryonic antigen (CEA); Epithelial cell adhesion molecule (EPCAM); B7H3 (CD276); KIT (CD117); Interleukin-13 receptor subunit alpha-2 (IL-13Ra2 or CD213A2); Mesothelin; Interleukin 11 receptor alpha (IL-11Ra); prostate stem cell antigen (PSCA); Protease Serine 21 (Testisin or PRSS21); vascular endothelial growth factor receptor 2 (VEGFR2); Lewis(Y) antigen; CD24; Platelet-derived growth factor receptor beta (PDGFR-beta); Stage-specific embryonic antigen-4 (SSEA-4); CD20; Folate receptor alpha; Receptor tyrosine-protein kinase ERBB2 (Her2/neu); Mucin 1, cell surface associated (MUC1); epidermal growth factor receptor (EGFR); neural cell adhesion molecule (NCAM); Prostase; prostatic acid phosphatase (PAP); elongation factor 2 mutated (ELF2M); Ephrin B2; fibroblast activation protein alpha (FAP); insulin-like growth factor 1 receptor (IGF-I receptor), carbonic anhydrase IX (CAIX); Proteasome (Prosome, Macropain) Subunit, Beta Type, 9 (LMP2); glycoprotein 100 (gp100); oncogene fusion protein consisting of breakpoint cluster region (BCR) and Abelson murine leukemia viral oncogene homolog 1 (Abl) (bcr-abl); tyrosinase; ephrin type-A receptor 2 (EphA2); Fucosyl GM1; sialyl Lewis adhesion molecule (sLe); ganglioside GM3 (aNeu5Ac(2-3)bDGalp(1-4)bDGlcp(1-1)Cer); transglutaminase 5 (TGS5); high molecular weight-melanoma-associated antigen (HMWMAA); o-acetyl-GD2 ganglioside (OAcGD2); Folate receptor beta; tumor endothelial marker 1 (TEM1/CD248); tumor endothelial marker 7-related (TEM7R); claudin 6 (CLDN6); thyroid stimulating hormone receptor (TSHR); G protein-coupled receptor class C group 5, member D (GPRC5D); chromosome X open reading frame 61 (CXORF61); CD97; CD179a; anaplastic lymphoma kinase (ALK); Polysialic acid; placenta-specific 1 (PLAC1); hexasaccharide portion of globoH glycoceramide (GloboH); mammary gland differentiation antigen (NY-BR-1); uroplakin 2 (UPK2); Hepatitis A virus cellular receptor 1 (HAVCR1); adrenoceptor beta 3 (ADRB3); pannexin 3 (PANX3); G protein-coupled receptor 20 (GPR20); lymphocyte antigen 6 complex, locus K 9 (LY6K); Olfactory receptor 51 E2 (OR51 E2); TCR Gamma Alternate Reading Frame Protein (TARP); Wilms tumor protein (WT1); Cancer/testis antigen 1 (NY-ESO-1); Cancer/testis antigen 2 (LAGE-1a); Melanoma-associated antigen 1 (MAGE-A1); ETS translocation-variant gene 6, located on chromosome 12p (ETV6-AML); sperm protein 17 (SPA17); X Antigen Family, Member 1A (XAGE1); angiopoietin-binding cell surface receptor 2 (Tie 2); melanoma cancer testis antigen-1 (MAD-CT-1); melanoma cancer testis antigen-2 (MAD-CT-2); Fos-related antigen 1; tumor protein p53 (p53); p53 mutant; prostein; surviving; telomerase; prostate carcinoma tumor antigen-1 (PCTA-1 or Galectin 8), melanoma antigen recognized by T cells 1 (MelanA or MART1); Rat sarcoma (Ras) mutant; human Telomerase reverse transcriptase (hTERT); sarcoma translocation breakpoints; melanoma inhibitor of apoptosis (ML-IAP); ERG (transmembrane protease, serine 2 (TMPRSS2) ETS fusion gene); N-Acetyl glucosaminyl-transferase V (NA17); paired box protein Pax-3 (PAX3); Androgen receptor; Cyclin B1; v-myc avian myelocytomatosis viral oncogene neuroblastoma derived homolog (MYCN); Ras Homolog Family Member C (RhoC); Tyrosinase-related protein 2 (TRP-2); Cytochrome P450 1B1 (CYP1B1); CCCTC-Binding Factor (Zinc Finger Protein)-Like (BORIS or Brother of the Regulator of Imprinted Sites), Squamous Cell Carcinoma Antigen Recognized By T Cells 3 (SART3); Paired box protein Pax-5 (PAX5); proacrosin binding protein sp32 (OY-TES1); lymphocyte-specific protein tyrosine kinase (LCK); A kinase anchor protein 4 (AKAP-4); synovial sarcoma, X breakpoint 2 (SSX2); Receptor for Advanced Glycation Endproducts (RAGE-1); renal ubiquitous 1 (RU1); renal ubiquitous 2 (RU2); legumain; human papilloma virus E6 (HPV E6); human papilloma virus E7 (HPV E7); intestinal carboxyl esterase; heat shock protein 70-2 mutated (mut hsp70-2); CD79a; CD79b; CD72; Leukocyte-associated immunoglobulin-like receptor 1 (LAIR1); Fc fragment of IgA receptor (FCAR or CD89); Leukocyte immunoglobulin-like receptor subfamily A member 2 (LILRA2); CD300 molecule-like family member f (CD300LF); C-type lectin domain family 12 member A (CLEC12A); bone marrow stromal cell antigen 2 (BST2); EGF-like module-containing mucin-like hormone receptor-like 2 (EMR2); lymphocyte antigen 75 (LY75); Glypican-3 (GPC3); Fc receptor-like 5 (FCRL5); and immunoglobulin lambda-like polypeptide 1 (IGLL1), e.g., as described herein.

[0385] In embodiments, the CAR includes an antigen recognition domain that binds CD19, e.g., as described herein. In embodiments, the CAR includes an anti-CD19 binding domain that includes, e.g., consists of, SEQ ID NO: 7895. In embodiments, the CAR includes an anti-CD19 binding domain that includes, e.g., consists of, SEQ ID NO: 7884.

[0386] In embodiments, the CAR includes an antigen recognition domain that binds BCMA, e.g., as described herein. In embodiments, the CAR includes an anti-BCMA binding domain that includes, e.g., consists of, SEQ ID NO: 7949.

[0387] In embodiments, the CAR includes an antigen binding domain, a transmembrane domain, and an intracellular signaling domain. In embodiments the transmembrane domain includes the sequence of SEQ ID NO: 6644. In embodiments, the intracellular signaling domain includes a primary signaling domain and/or a costimulatory signaling domain. In embodiments, the primary signaling domain includes, e.g., consists of, the sequence of SEQ ID NO: 6648 or SEQ ID NO: 6650. In embodiments, the costimulatory signaling domain includes, e.g., consists of, the sequence of SEQ ID NO: 6646 or SEQ ID NO: 6636, e.g., includes, e.g., consists of, the sequence of SEQ ID NO: 6646. In other embodiments, the costimulatory signaling domain includes sequence from the intracellular signaling domain of CD28.

[0388] In embodiments, the CAR is a CD19 CAR, and includes, e.g., consists of, the sequence of SEQ ID NO: 7920. In embodiments, the CAR is a CD19 CAR, and includes, e.g., consists of, the sequence of SEQ ID NO: 7909. In embodiments, the cell, e.g., described herein, includes nucleic acid sequence encoding a CD19 CAR described herein, e.g., a CD19 CAR that includes the sequence of SEQ ID NO: 7920 or SEQ ID NO: 7909.

[0389] In embodiments, the CAR is a BCMA CAR, and includes, e.g., consists of, the sequence of SEQ ID NO: 8559. In embodiments, the cell, e.g., described herein, includes nucleic acid sequence encoding a BCMA CAR described herein, e.g., a BCMA CAR that includes SEQ ID NO: 8559. In embodiments, the nucleic acid sequence encoding the BCMA CAR includes, e.g., consists of, SEQ ID NO: 8574.

[0390] In aspects, the cell of the invention (e.g., the population of the cells of the invention), e.g., described herein, further include nucleic acid sequence encoding an NK inhibitory molecule. Such cells are preferred when the cells exhibit reduced or eliminated expression of one or more major histocompatibility class I (MHC I) molecules (e.g., via reduced or eliminated expression of B2M, e.g., achieved by the methods described herein) and/or reduced or eliminated expression of one or more major histocompatibility class II (MHC II) molecules (e.g., via reduced or eliminated expression of CIITA, e.g., achieved by the methods described herein). In embodiments, the NK inhibitory molecule is an HLA-G molecule, e.g., an HLA-G molecule that does not require B2M, e.g., HLA-G2, HLA-G3, HLA-G4. In other embodiments, the NK inhibitory molecule is an HLA-G:B2M fusion molecule. An exemplary HLA-G:B2M fusion molecule is SEQ ID NO: 10674. An exemplary nucleic acid sequence encoding said HLA-G:B2M fusion is SEQ ID NO: 10675.

[0391] In embodiments, the cell (e.g., population of cells), exhibits reduced or eliminated expression of a target of an NK inhibitory molecule, e.g., reduced or eliminated expression of LILRB1.

[0392] In embodiments, a CAR-expressing cell of the invention (e.g., the cell wherein expression or function of one or more proteins has been reduced or eliminated, e.g., by the methods described herein), maintains the ability to proliferate in response to stimulation, for example, binding of the CAR to its target antigen. In embodiments, the proliferation occurs ex vivo. In embodiments, the proliferation occurs in vivo. In embodiments, the proliferation occurs both ex vivo and in vivo. In embodiments, the level of proliferation is substantially the same as the level of proliferation exhibited by the same cell type (e.g., a CAR-expressing cell of the same type) but which has not had expression or function of one or more proteins reduced or eliminated, e.g., by the methods described herein. In embodiments, the level of proliferation is at least 80%, at least 85%, at least 90%, at least 95%, at least 98% or more of the level of proliferation exhibited by the same cell type (e.g., a CAR-expressing cell of the same type) but which has not had expression or function of one or more proteins reduced or eliminated, e.g., by the methods described herein.

[0393] Unless otherwise defined, all technical and scientific terms used herein have the same meaning as commonly understood by one of ordinary skill in the art to which this invention belongs. Although methods and materials similar or equivalent to those described herein can be used in the practice or testing of the present invention, suitable methods and materials are described below. All publications, patent applications, patents, and other references mentioned herein are incorporated by reference in their entirety. In addition, the materials, methods, and examples are illustrative only and not intended to be limiting. Headings, sub-headings or numbered or lettered elements, e.g., (a), (b), (i) etc, are presented merely for ease of reading. The use of headings or numbered or lettered elements in this document does not require the steps or elements be performed in alphabetical order or that the steps or elements are necessarily discrete from one another. Other features, objects, and advantages of the invention will be apparent from the description and drawings, and from the claims.

### BRIEF DESCRIPTION OF THE DRAWINGS

[0394] FIG. 1: Cas9 editing of the B2M locus. Fraction of editing detected by NGS in HEK-293 Cas9GFP 24 h post-delivery of crRNA targeting the B2M locus and trRNA by lipofection. Each dot indicates a different crRNA, the trRNA was held constant. Genomic coordinates indicate location on Chromosome 15. (n=3).

[0395] FIG. 2: Histogram for TCR expression after editing with gRNA molecules comprising targeting domains to TCR-alpha, as listed in table 1. Shown is the % mCherry+TCR− cells after 7 days in Jurkat cells, using three different concentrations of lentivirus.

[0396] FIG. 3: Shown is the % TCR− primary T cells 6 and 12 days after introduction of lentivirus encoding the gRNA shown and Cas9/mCherry. Data represents % mCherry+TCR− edited cells.

[0397] FIG. 4: Shown is the % PD1—primary T cells in the mCherry+gated population 3 days post restimulation (with CD3/CD28 beads) and 8 days post activation, in cells transfected with lentivirus encoding the gRNA indicated and Cas9/mCherry.

[0398] FIGS. 5A and 5B: Shown is expression of TCR on day 7 of culture using TRAC-8 gRNA (FIG. 5A) and PD-1 on day 8 of culture using PD1-6 gRNA (FIG. 5B) histograms.

[0399] FIG. 6: Expression profiles of primary T cells engineered to express a CD19 CAR and treated with RNP comprising gRNA targeting TCR alpha. Pre-enrichment shows the cell populations that are CAR+/− and TCR+/− following 11 days in culture. Post-enrichment shows >98% TCR− T cells after isolation using a CD3 microbead negative selection step.

[0400] FIG. 7: Shown is the cytotoxic activity of CD19 CAR transduced T-cells against a target positive (Nalm6-luc) and target negative (K562-luc) cell line. “T1” and “T8” refer to gRNA TRAC-1 and TRAC-8 respectively. Shown are lentivirus or RNP-introduced Cas9/gRNA, and the results for both unsorted and TCR− sorted (“sorted”) T cell populations

[0401] FIG. 8: Excision within the B2M gene employing CRISPR systems comprising two gRNA molecules. In each experiment, cells were exposed to gRNA with the targeting domain of CR00442 and a second gRNA molecule, as indicated. Shown is the predicted excision product size.

[0402] FIG. 9: Results of gRNA pair exposure to B2M gene with expected excision products of less than 100. * indicates expected excision product seen (green arrow); ?=expected excision product could not be resolved from the assay. Yellow arrow indicates wild type fragment.

[0403] FIG. 10: Results of gRNA pair exposure to B2M gene with expected excision products ˜4000 base pairs. Red * indicates expected excision product seen (green box); Purple *=less than 10% editing efficiency. Orange boxes indicate wild type fragment.

[0404] FIG. 11: Results of gRNA pair exposure to B2M gene with expected excision products ˜6000 base pairs. Red * indicates expected excision product seen (green box); Purple *=less than 10% editing efficiency. Orange boxes indicate wild type fragment.

[0405] FIG. 12: Mean (n>3) editing of CRISPR systems with dgRNAs as indicated to TRAC in HEK cells (stably expressing Cas9) or primary human CD3+ T cells (delivery of dgRNA:Cas9 RNP by electroporation). Also shown is % of cells exhibiting loss of TCR as determined by flow cytometry using an anti-TCRa/b antibody.

[0406] FIG. 13: Mean (n>3) editing of CRISPR systems with dgRNAs as indicated to coding regions of TRBC1 and TRBC2 in HEK cells (stably expressing Cas9). Also shown is % of T cells exhibiting loss of TCR as determined by flow cytometry using an anti-TCR a/b antibody.

[0407] FIG. 14: Mean (n>3) editing of CRISPR systems with dgRNAs as indicated to B2M in HEK cells (stably expressing Cas9), in CD34+ primary human hematopoietic stem cells, and % loss of B2M in primary CD3+ T cells as measured by flow cytometry. NGS assays were run 24 hours after introduction of the CRISPR systems to the indicated cells; Flow cytometry assay was run 3-5 days after introduction of the CRISPR systems to the CD3+ T cells.

[0408] FIG. 15: Editing as measured by loss of TCR (flow cytometry) of CRISPR systems comprising the indicated gRNA molecule in primary human CD3+ T cells from three different donors. For each gRNA, left bar=donor #1; middle bar=donor #2; right bar=donor #3.

[0409] FIG. 16: Mean (n>3) editing of CRISPR systems with dgRNAs as indicated to PDCD1 in HEK cells (stably expressing Cas9) as measured by NGS, and in primary human CD3+ cells (RNP electroporation) as measured by loss of PD-1 (flow cytometry using anti-PD-1 antibody).

[0410] FIG. 17A: Flow Cytometry expression of TCR and/or B2M after electroporation of gRNA to TRAC and/or B2M at the indicated ratios.

[0411] FIG. 17B: % of cells negative for both B2M and TCR at the indicated gRNA ratios.

[0412] FIG. 17C: editing of either B2M or TCR as measured by flow cytometry.

[0413] FIG. 17D: Viability of cells 24 hours after electroporation.

[0414] FIG. 18: % Editing using dgRNAs containing targeting domains to PDCD1 (the targeting domain of the CRxxxx sequence indicated) in primary CD3+ T cells as measured by NGS (yellow bars) or loss of PD-1 by flow cytometry (using anti-PD-1 antibody). NGS sequencing was performed 24 hours post-RNP delivery; flow cytometry performed at day 5 post-RNP delivery.

[0415] FIG. 19: % Editing (n>=3) using dgRNAs containing targeting domains to PDCD1 (the targeting domain of the CRxxxx sequence indicated) in primary CD3+ T cells as measured by loss of PD-1 by flow cytometry (using anti-PD-1 antibody) across three different donors (donor #4, left-most bar; donor $5, middle bar; donor #6, right-most bar). Systems with targeting domains to some targets show >50% loss of PD-1, with consistent results across multiple donors. gRNAs including the targeting domain of CR00852, CR00828, CR00870, CR00848, CR00855 and CR00838 show greater than 50% editing across at least 2 donors.

[0416] FIG. 20: % Editing (n>=3) using dgRNAs containing targeting domains to B2M (the targeting domain of the CRxxxx sequence indicated) in primary CD3+ T cells as measured by loss of B2M by flow cytometry across three different donors (donor #1, left-most bar; donor #4, middle bar; donor #5, right-most bar). Systems with targeting domains to some target sequences show >40% loss of B2M, with consistent results across multiple donors. gRNAs including the targeting domain of CR00442, CR00444 and CR00455 show greater than 40% editing across at least 2 donors.

[0417] FIG. 21: % editing (N=3) as measured by NGS in HEK293 cells stably expressing Cas9 using dgRNAs that include the targeting domain to FKBP1A as indicated (each unlabeled bar uses the targeting domain of the odd-numbered CRxxxx that falls between the labeled numbers. For example, the data for the dgRNA that includes the targeting domain of CR002073 is reported at the bar falling between that labeled CR002072 and CR002074).

[0418] FIG. 22: % editing (N=3) and % Frameshift edit (FS) as measured by NGS in HEK293 cells stably expressing Cas9 using dgRNAs that include the targeting domain to FKBP1A as indicated.

[0419] FIG. 23: % editing (N=3) and % Frameshift edit (FS) as measured by NGS in HEK293 cells stably expressing Cas9 using dgRNAs that include the targeting domain to FKBP1A as indicated.

[0420] FIG. 24: % editing (N=3) and % Frameshift edit (FS edit) as measured by NGS in CD3+ T cells using RNPs that include dgRNAs that include the targeting domain to FKBP1A indicated.

[0421] FIG. 25: % of CD3+ T cells that are B2M−, TCR− (as measured by anti-CD3 Ab), or B2M−/TCR− (double negative) as measured by FACS (at day 4 following first electroporation) following either sequential electroporation of RNPs comprising gRNAs to the targets, or simultaneous electroporation of RNPs comprising gRNAs to the targets.

[0422] FIG. 26: % of CD3+ T cells that are B2M−, TCR− (as measured by anti-CD3 Ab), or B2M−/TCR− (double negative) as measured by NGS (48 hours following first electroporation) following either single electroporation, sequential electroporation of RNPs comprising gRNAs to the targets, or simultaneous (“Simult”) electroporation of RNPs comprising gRNAs to the targets (B2M and TRAC).

[0423] FIG. 27: Schematic for preparation of gene edited TCR−/B2M-BCMA CAR transduced T cells.

[0424] FIG. 28: Surface expression of TCR (using anti-CD3-PercpCy5.5) and B2M (using anti-B2M-APC) five days post (RNP) electroporation. T-cells transduced with RNPs containing gRNA to B2M labeled “B2M”; T-cells transduced with RNPs containing gRNA to TRAC labeled “TCR”. T-cells transduced with BCMA CAR are indicated as “CAR”. Untransduced cells are indicated as “UTD”. Cells electroporated with Cas9 but no guide RNA are indicated as “no guide”. CD4 staining using anti-CD4-V450 is shown in the lower panel to verify that the loss of CD3 staining is due to loss of the TCR and not due to loss of T-cells.

[0425] FIG. 29: Surface expression of TCR and B2M compared in total T cells versus CAR+ T cells from each population. “CAR” indicates CAR transduction; “No Guide” indicates Cas9 electroporation with no gRNA; “B2M” indicates electroporation with RNP containing gRNA specific for B2M; “TCR” indicates electroporation with RNP containing gRNA specific for TRAC.

[0426] FIG. 30: CAR expression levels in cells electroporated with RNPs containing gRNAs specific for B2M (“B2M”) and TRAC (“TCR”) or electroporated with Cas9 without grNA (“No guide”).

[0427] FIG. 31: Evaluation of T-cell proliferation in response to tumor cell lines expressing a high level of BCMA (KMS11), a low level of BCMA (RPMI8226) or which are BCMA-(Nalm6). T cells are either electroporated with cas9 with no gRNA (“No guide”) or electroporated with RNP containing gRNAs to B2M and TRAC (“B2M+TCR”); and/or either transduced with lentiviral vector encoding a BCMA CAR (“BCMA CAR”) or untransduced (“UTD”), as indicated.

[0428] FIG. 32: Proliferation of CAR+CD4+ and/or CD8+ T cells in response to tumor cell lines expressing a high level of BCMA (KMS11), a low level of BCMA (RPMI8226) or which are BCMA-(Nalm6). Cells are either electroporated with cas9 with no gRNA (“No guide”) or electroporated with RNP containing gRNAs to B2M and TRAC (“B2M+TCR”); and/or either transduced with lentiviral vector encoding a BCMA CAR (“BCMA CAR”) or untransduced (“UTD”), as indicated.

[0429] FIGS. 33A and 33B: Evaluation of TRAC targeting gRNAs for effects on cell surface TCR expression. 33A shows loss of CD3 staining is shown for RNPs containing guides CR000961 (961), CR000978 (978), CR000984 (984), CR000992 (992), CR000985 (985), and CR000960 (gRNA1) and CR000979 (gRNA8). 33B shows loss of CD3 staining is shown for RNPs containing guides CR000991 (991), CR000992 (992), CR000993 (993), and CR000978 (978). 991 and 992 are nearly superimposable.

[0430] FIG. 33C: Genomic editing of the TRAC locus resulting from human primary T cell electroporation with RNP containing the indicated gRNA targeting the TRAC locus is shown. The frequency of insertions or deletions is indicated (% indels) and the percentage of these edits that result in frameshifting of the coding sequence is shown (% frameshift edits).

[0431] FIGS. 34A and 34B: The top 5 most frequently observed sequence changes are shown in detail for each TRAC targeting gRNA used for primary human T cell editing. FIGS. 34A and 34B are the outcome from 2 independently performed electroporation experiments. Wild type (wt) unmodified bases are shown in uppercase letters. Deletions relative to wt sequence are shown by “−”; insertions relative to wt sequence are shown by lowercase letters. Data for each experiment are the average from triplicate PCR products. FIG. 34A to 34B disclose SEQ ID NOS 10845-10899, respectively, in order of appearance.

[0432] FIG. 35: Evaluation of B2M targeting gRNAs for effects on cell surface B2M expression. Guide numbers indicate CR00xxx identifier of targeting domain.

[0433] FIG. 36: Genomic editing of the B2M locus resulting from human primary T cell electroporation with RNP containing the indicated gRNA targeting the B2M locus. The frequency of insertions or deletions is indicated (% indels) and the percentage of these edits that result in frameshifting of the coding sequence is shown (% frameshift edits) in the top panel. The top 10 most frequently observed sequence changes are shown in the bottom panel in detail for each B2M targeting gRNA used for primary human T cell editing. Wild type (wt) unmodified bases are shown in uppercase letters. Deletions relative to wt sequence are shown by “−”; insertions relative to wt sequence are shown by lowercase letters. Data are the average from triplicate PCR products. FIG. 36 discloses SEQ ID NOS 10900-10919, respectively, in order of appearance.

[0434] FIG. 37: % editing at Day 3 post electroporation (Day 5 of cell culture) in primary human T cells by RNPs that include the indicated dgRNA to CIITA (number indicates CRxxxxx identifier of targeting domain) at the indicated concentration, as measured by flow cytometry using an anti-HLA-DR reagent.

[0435] FIG. 38: Genomic editing of the CIITA locus resulting from human primary T cell electroporation with RNP containing the indicated gRNA targeting the CIITA locus is shown. The frequency of insertions or deletions is indicated (% indels) and the percentage of these edits that result in frameshifting of the coding sequence is shown (% frameshift edits). The top 5 most frequently observed sequence changes are shown in detail in the bottom panel. Wild type (wt) unmodified bases are shown in uppercase letters. Deletions relative to wt sequence are shown by “−”; insertions relative to wt sequence are shown by lowercase letters. Data are the average from triplicate PCR products. FIG. 38 discloses SEQ ID NOS 10920-10939, respectively, in order of appearance.

[0436] FIG. 39: % editing at Day 3 post electroporation in primary human T cells by RNPs that include the indicated dgRNA to CIITA (number indicates CR00xxxx identifier of targeting domain) at the indicated concentration, as measured by flow cytometry using an anti-HLA-DR reagent. % editing represents the expression of HLA-DR at the cell surface in cells electroporated with CIITA guide relative to the expression in cells electroporated without guide RNA.

[0437] FIG. 40: Genomic editing of the CIITA locus resulting from human primary T cell electroporation with RNP containing the indicated gRNA targeting the CIITA locus is shown. The frequency of insertions or deletions is indicated (% indels) and the percentage of these edits that result in frameshifting of the coding sequence is shown (% frameshift edits).

[0438] FIG. 41: The top 5 most frequently observed sequence changes (indels) for each CIITA targeting gRNA used for primary human T cell editing. Data are the average from triplicate PCR products. Wild type (wt) unmodified bases are shown in uppercase letters. Deletions relative to wt sequence are shown by “−”; insertions relative to wt sequence are shown by lowercase letters. FIG. 41 discloses SEQ ID NOS 10940-10974, respectively, in order of appearance.

[0439] FIG. 42: % editing at Day 3 post electroporation in primary human T cells by RNPs that include the indicated dgRNA to CIITA (number indicates CR00xxxx identifier of targeting domain) at the indicated concentration, as measured by flow cytometry using an anti-HLA-DR reagent. % editing represents the expression of HLA-DR at the cell surface in cells electroporated with CIITA guide relative to the expression in cells electroporated without guide RNA.

[0440] FIG. 43: Genomic editing of the CIITA locus resulting from human primary T cell electroporation with RNP containing the indicated gRNA targeting the CIITA locus is shown. The frequency of insertions or deletions is indicated (% indels) and the percentage of these edits that result in frameshifting of the coding sequence is shown (% frameshift edits).

[0441] FIG. 44. The top 5 most frequently observed sequence changes for each CIITA targeting gRNA used for primary human T cell editing. Data are the average from triplicate PCR products. Wild type (wt) unmodified bases are shown in uppercase letters. Deletions relative to wt sequence are shown by “−”; insertions relative to wt sequence are shown by lowercase letters. FIG. 44 discloses SEQ ID NOS 10975-11014, respectively, in order of appearance.

[0442] FIG. 45: Schematic protocol for preparation of primary human T cells edited at the B2M, TRAC, and CIITA loci (triple edited cells).

[0443] FIG. 46: Evaluation of editing of TRAC, B2M, and CIITA by testing cell surface expression of CD3 epsilon, B2M, and HLA-DR, respectively, by flow cytometry. Cell surface expression was tested in cells that had been electroporated with a single targeting RNP (B2M 442 single, TRAC 961 single, or CIITA 991 single) or with 3 RNPs simultaneously (Triple 1, Triple 2, Triple 3, Triple 4; according to the details in FIG. 45). Cells without electroporation are indicated as “No EP”. Cells electroporated with Cas9 but no guide RNA are indicated as “No Guide”.

[0444] FIG. 47: Genomic editing of the B2M, TRAC, and CIITA loci resulting from human primary T cell simultaneous electroporation with 3 RNPs containing gRNAs targeting the B2M, TRAC, and CIITA loci. The frequency of insertions or deletions is indicated (% indels) and the percentage of these edits that result in frameshifting of the coding sequence is shown in parentheses.

[0445] FIG. 48: The top 10 most frequently observed sequence changes at the B2M locus in primary human T cells for the B2M targeting gRNA CR00442 in the context of simultaneous editing of 3 loci (triple editing) with different concentrations of each RNP as shown in the schematic in FIG. 45. Wild type (wt) unmodified bases are shown in uppercase letters. Deletions relative to wt sequence are shown by “−”; insertions relative to wt sequence are shown by lowercase letters. Data are the average from triplicate PCR products. FIG. 48 discloses SEQ ID NOS 11015-11054, respectively, in order of appearance.

[0446] FIG. 49: The top 10 most frequently observed sequence changes at the TRAC locus in primary human T cells for the TRAC targeting gRNA CR000961 in the context of simultaneous editing of 3 loci (triple editing) with different concentrations of each RNP as shown in the schematic in FIG. 45. Wild type (wt) unmodified bases are shown in uppercase letters. Deletions relative to wt sequence are shown by “−”; insertions relative to wt sequence are shown by lowercase letters. Data are the average from triplicate PCR products. FIG. 49 discloses SEQ ID NOS 11055-11094, respectively, in order of appearance.

[0447] FIG. 50: The top 10 most frequently observed sequence changes at the CIITA locus in primary human T cells for the CIITA targeting gRNA CR002991 in the context of simultaneous editing of 3 loci (triple editing) with different concentrations of each RNP as shown in the schematic in FIG. 45. Wild type (wt) unmodified bases are shown in uppercase letters. Deletions relative to wt sequence are shown by “−”; insertions relative to wt sequence are shown by lowercase letters. Data are the average from triplicate PCR products. FIG. 50 discloses SEQ ID NOS 11095-11134, respectively, in order of appearance.

[0448] FIG. 51: The format of the guide RNA was evaluated for efficiency of editing. Guide RNAs against TRAC (CR000961; upper panel) or B2M (CR00442; lower panel) were synthesized in the single guide or dual guide format with or without the indicated chemical modifications (PS or OMePS). RNPs were electroporated into human primary T cells at the indicated concentrations. Editing efficiency was evaluated by analysis of cell surface staining of CD3 epsilon for TRAC editing (upper) and B2M protein for B2M editing (lower) by flow cytometry.

[0449] FIG. 52: Genomic editing of the FKBP1A locus resulting from human primary T cell electroporation with RNPs containing the indicated gRNAs targeting FKBP1A. The frequency of insertions or deletions is indicated (% indels) and the percentage of these edits that result in frameshifting of the coding sequence is shown.

[0450] FIG. 53: The top 5 most frequently observed sequence changes for each FKBP1A targeting gRNA used for primary human T cell editing are shown. Wild type (wt) unmodified bases are shown in uppercase letters. Deletions relative to wt sequence are shown by “−”; insertions relative to wt sequence are shown by lowercase letters. Data are the average from triplicate PCR products. FIG. 53 discloses SEQ ID NOS 11135-11159, respectively, in order of appearance.

[0451] FIG. 54: T cells were edited with RNPs containing gRNAs comprising targeting domains to FKBP1A (CR002086, CR002097, CR002122; indicated as 2086, 2097, and 2112, respectively) or with negative controls: 442 (an irrelevant guide CR00442 targeting B2M); Cas9 (Cas9 alone with no trRNA or crRNA); trRNA (tracer RNA, but no crRNA or Cas9 protein); Cas9+trRNA (Cas9 and tracer RNA but no crRNA); EP (cells only with electroporation); no EP (cells only with no electroporation). After electroporation cells were treated with 2.5 nM RAD001 (FIG. 54A) or left untreated (FIG. 54B) and the impact on mTOR pathway inhibition was evaluated by analyzing S6 phosphorylation (pS6) by flow cytometry. The Y-axis indicates forward scatter (FSC) and the X-axis indicates the level of pS6. Positive staining for pS6 (shown in the gating trace) was determined by gating above the fluorescence level seen in a control stained with isotype antibody (not shown). Quantitation of S6 phosphorylation from the flow cytometry data is shown in the graph in the lower panel (FIG. 54C).

[0452] FIGS. 55A and 55B: Cytokine production by edited CART cells in response to antigen exposure. Gene editing was performed on CART cells using the CR000961 guide to target the TRAC locus and/or the CR002097 and CR002086 guides to target the FKBP1A locus (as indicated by cr961, 2097, and 2086, respectively). CART cells electroporated with an RNP containing no guide RNA were prepared as a negative control. CART cells expressing either CART-CD19, CART-BCMA-10, or untransduced (UTD) (as indicated) were mixed with the indicated cancer cell (KMS11 (BCMA positive), Nalm6 (CD19 positive), or RPMI8226 (BCMA positive)) at an effector to target ratio of either 1:1 or 1:2.5 (as indicated). Cell culture supernatants were collected and interferon gamma was measured (Figure A) or IL-2 was measured (Figure B).

[0453] FIG. 56: Killing of antigen positive cancer cell lines by edited CART cells. Gene editing was performed on CART cells using the CR000961 guide to target the TRAC locus and/or the CR002097 and CR002086 guides to target the FKBP1A locus (as indicated by cr961, 2097, and 2086, respectively). CART cells electroporated with an RNP containing no guide RNA were prepared as a negative control. CART cells expressing either CART-CD19, CART-BCMA-10, or untransduced (UTD) (as indicated) were mixed with the indicated cancer cell lines that stable express the luciferase reporter (KMS11 (BCMA positive), Nalm6 (CD19 positive), or RPMI8226 (BCMA positive)) at an effector to target ratio of 1:1. Luciferase signal was measured and cell killing was determined as a loss of luciferase activity.

[0454] FIG. 57: Proliferation of edited CART cells in response to antigen exposure. Gene editing was performed on CART cells using the CR000961 guide to target the TRAC locus and/or the CR002097 and CR002086 guides to target the FKBP1A locus (as indicated by 961, 2097, and 2086, respectively). CART cells electroporated with an RNP containing no guide RNA were prepared as a negative control. CART cells expressing either CART-CD19 (labeled CD19CAR), CART-BCMA-10 (labeled BCMA10CAR), or untransduced (UTD) (as indicated) were mixed with the indicated cancer cell lines (KMS11 (BCMA positive), Nalm6 (CD19 positive), or RPMI8226 (BCMA positive)) at an effector to target ratio of 1:1. Proliferation was measured by counting the sum of CD4+ and CD8+ cells that are CAR+ relative to a fixed number of counting beads.

[0455] FIG. 58: Sensitivity to gene edited (TRAC and/or FKBP1A) CART cells to RAD001. CART cells were prepared expressing the BCMA10 CAR (FIG. 58A-1, FIG. 58A-2, and FIG. 58A-3), the CD19 CAR (FIG. 58B-1. FIG. 58B-2, and FIG. 58B-3), or no CAR (FIG. 59C-1, FIG. 58C-2, and FIG. 58C-3; UTD). Gene editing was performed on CART cells or UTD cells using the CR000961 guide to target the TRAC locus and/or the CR002097 and CR002086 guides to target the FKBP1A locus (as indicated by 961, 2097, and 2086, respectively). CART cells electroporated with an RNP containing no guide RNA were prepared as a negative control. After RNP electroporation cells were treated with 2.5 nM RAD001 (upper panel, indicated at +RAD001) or left untreated (lower panel, indicated as −RAD001) and the impact on mTOR pathway inhibition was evaluated by analyzing S6 phosphorylation (pS6) by flow cytometry. The Y-axis indicates side scatter (SSC) and the X-axis indicates the level of phosphorylated S6 protein (pS6). Positive staining for pS6, shown in the lower right quadrant of the FACS plots, was determined by gating above the fluorescence level seen in a control stained with isotype antibody (not shown). The percentage of cells with phosphorylation of S6 is shown with histograms (upper panels) and graphically (lower panel).

[0456] FIG. 59: Expression of HLA-G/B2M fusion protein in SupT1 cells, as detected by HLA-G flow cytometry. The light gray histogram indicates the background fluorescence in the PE channel in untransduced cells. The dark gray histogram indicates fluorescence in the PE channel from cells transduced with HLA-G/B2M.

[0457] FIG. 60: Editing efficiency at targeted B2M locus in CD34+ hematopoietic stem cells by different Cas9 variants, as evaluated by NGS and Flow cytometry. NLS=SV40 NLS; His6 (SEQ ID NO: 10795) or His8 (SEQ ID NO: 10796) refers to 6 or 8 histidine residues, respectively; TEV=tobacco etch virus cleavage site; Cas9=wild type S. pyogenes Cas9—mutations or variants are as indicated).

[0458] FIG. 61: Editing efficiency at targeted B2M locus in primary human T cells by different Cas9 variants and a range of concentrations, as measured by flow cytometry.

[0459] FIG. 62: Editing efficiency of two different Cas9 variants, at various concentrations, in primary human T cells using two different gRNAs targeting either B2M (left panel) or TRAC (right panel). Editing efficiency (% editing) was measured by flow cytometry by measuring the loss of cell surface expression of B2M (left panel) or TCR (right panel).

[0460] FIG. 63: Off-target activity for TRAC and B2M guides was assessed using an dsDNA oligo-insertion method in Cas9 overexpressing HEK-293 cells. The on-target site (triangle) and the potential off-target sites (circles) detected are indicated; y-axis indicates frequency of detection. All gRNAs were tested in dgRNA format with the targeting domain indicated by the CRxxxxx identifier. Where indicated, each gRNA was modified such that the 5′ three internucleotide bonds and the 3′ three internucleotide bonds are phosphorothioate bonds (“PS”).

[0461] FIG. 64: Off-target activity for CIITA−, FKBP1A−, PDCD1−, TRAC- and TRBC2-targeting guide RNA molecules was assessed using an dsDNA oligo-insertion method in Cas9 overexpressing HEK-293 cells. The on-target site (triangle) and the potential off-target sites (circles) detected are indicated; y-axis indicates frequency of detection. All gRNAs were tested in dgRNA format with the targeting domain indicated by the CRxxxxx identifier.

[0462] FIG. 65: % editing in primary human CD3+ T cells as measured by loss of surface expression of CD3 (as measured by flow cytometry) 72 hours after introduction of CRISPR systems targeting CD3 delta (dgRNA comprising the indicated targeting domain). Each % CD3-negative cells is the average of three independent experiments (SD=standard deviation).

[0463] FIG. 66: % editing in primary human CD3+ T cells as measured by loss of surface expression of CD3 (as measured by flow cytometry) 72 hours after introduction of CRISPR systems targeting CD3 gamma (dgRNA comprising the indicated targeting domain). Each % CD3-negative cells mean value is the average of three independent experiments (SD=standard deviation).

### DEFINITIONS

[0464] The terms “CRISPR system,” “Cas system” or “CRISPR/Cas system” refer to a set of molecules comprising an RNA-guided nuclease or other effector molecule and a gRNA molecule that together are necessary and sufficient to direct and effect modification of nucleic acid at a target sequence by the RNA-guided nuclease or other effector molecule. In one embodiment, a CRISPR system comprises a gRNA and a Cas protein, e.g., a Cas9 protein. Such systems comprising a Cas9 or modified Cas9 molecule are referred to herein as “Cas9 systems” or “CRISPR/Cas9 systems.” In one example, the gRNA molecule and Cas molecule may be complexed, to form a ribonuclear protein (RNP) complex.

[0465] The terms “guide RNA,” “guide RNA molecule,” “gRNA molecule” or “gRNA” are used interchangeably, and refer to a set of nucleic acid molecules that promote the specific directing of a RNA-guided nuclease or other effector molecule (typically in complex with the gRNA molecule) to a target sequence. In some embodiments, said directing is accomplished through hybridization of a portion of the gRNA to DNA (e.g., through the gRNA targeting domain), and by binding of a portion of the gRNA molecule to the RNA-guided nuclease or other effector molecule (e.g., through at least the gRNA tracr). In embodiments, a gRNA molecule consists of a single contiguous polynucleotide molecule, referred to herein as a “single guide RNA” or “sgRNA” and the like. In other embodiments, a gRNA molecule consists of a plurality, usually two, polynucleotide molecules, which are themselves capable of association, usually through hybridization, referred to herein as a “dual guide RNA” or “dgRNA,” and the like. gRNA molecules are described in more detail below, but generally include a targeting domain and a tracr. In embodiments the targeting domain and tracr are disposed on a single polynucleotide. In other embodiments, the targeting domain and tracr are disposed on separate polynucleotides.

[0466] The term “targeting domain” as the term is used in connection with a gRNA, is the portion of the gRNA molecule that recognizes, e.g., is complementary to, a target sequence, e.g., a target sequence within the nucleic acid of a cell, e.g., within a gene.

[0467] The term “crRNA” as the term is used in connection with a gRNA molecule, is a portion of the gRNA molecule that comprises a targeting domain and a region that interacts with a tracr to form a flagpole region.

[0468] The term “target sequence” refers to a sequence of nucleic acids complimentary, for example fully complementary, to a gRNA targeting domain. In embodiments, the target sequence is disposed on genomic DNA. In an embodiment the target sequence is adjacent to (either on the same strand or on the complementary strand of DNA) a protospacer adjacent motif (PAM) sequence recognized by a protein having nuclease or other effector activity, e.g., a PAM sequence recognized by Cas9. In embodiments, the target sequence is a target sequence of an allogeneic T cell target. In embodiments, the target sequence is a target sequence of an inhibitory molecule. In embodiments, the target sequence is a target sequence of a downstream effector of an inhibitory molecule.

[0469] The term “flagpole” as used herein in connection with a gRNA molecule, refers to the portion of the gRNA where the crRNA and the tracr bind to, or hybridize to, one another.

[0470] The term “tracr” as used herein in connection with a gRNA molecule, refers to the portion of the gRNA that binds to a nuclease or other effector molecule. In embodiments, the tracr comprises nucleic acid sequence that binds specifically to Cas9. In embodiments, the tracr comprises nucleic acid sequence that forms part of the flagpole.

[0471] The terms “Cas9” or “Cas9 molecule” refer to an enzyme from bacterial Type II CRISPR/Cas system responsible for DNA cleavage. Cas9 also includes wild-type protein as well as functional and non-functional mutants thereof.

[0472] The term “complementary” as used in connection with nucleic acid, refers to the pairing of bases, A with T or U, and G with C. The term complementary refers to nucleic acid molecules that are completely complementary, that is, form A to T or U pairs and G to C pairs across the entire reference sequence, as well as molecules that are at least 80%, 85%, 90%, 95%, 99% complementary.

[0473] “Template Nucleic Acid” as used in connection with homology-directed repair or homologous recombination, refers to nucleic acid to be inserted at the site of modification by the CRISPR system donor sequence for gene repair (insertion) at site of cutting. In one aspect, the template nucleic acid comprises nucleic acid sequence encoding a chimeric antigen receptor (CAR), e.g., as described herein. In one aspect, the template nucleic acid comprises a vector comprising nucleic acid sequence encoding a chimeric antigen receptor (CAR), e.g., as described herein.

[0474] An “indel,” as the term is used herein, refers to a nucleic acid comprising one or more insertions of nucleotides, one or more deletions of nucleotides, or a combination of insertions and deletions of nucleotides, relative to a reference nucleic acid, that results after being exposed to a composition comprising a gRNA molecule, for example a CRISPR system. Indels can be determined by sequencing nucleic acid after being exposed to a composition comprising a gRNA molecule, for example, by NGS. With respect to the site of an indel, an indel is said to be “at or near” a reference site (e.g., a site complementary to a targeting domain of a gRNA molecule) if it comprises at least one insertion or deletion within about 10, 9, 8, 7, 6, 5, 4, 3, 2, or 1 nucleotide(s) of the reference site, or is overlapping with part or all of said reference site (e.g., comprises at least one insertion or deletion overlapping with, or within 10, 9, 8, 7, 6, 5, 4, 3, 2, or 1 nucleotides of a site complementary to the targeting domain of a gRNA molecule, e.g., a gRNA molecule described herein).

[0475] An “indel pattern,” as the term is used herein, refers to a set of indels that results after exposure to a composition comprising a gRNA molecule. In an embodiment, the indel pattern consists of the top three indels, by frequency of appearance. In an embodiment, the indel pattern consists of the top five indels, by frequency of appearance. In an embodiment, the indel pattern consists of the indels which are present at greater than about 5% frequency relative to all sequencing reads. In an embodiment, the indel pattern consists of the indels which are present at greater than about 10% frequency relative to total number of indel sequencing reads (i.e., those reads that do not consist of the unmodified reference nucleic acid sequence). In an embodiment, the indel pattern includes of any 3 of the top five most frequently observed indels. The indel pattern may be determined, for example, by sequencing cells of a population of cells which were exposed to the gRNA molecule.

[0476] An “off-target indel,” as the term I used herein, refers to an indel at or near a site other than the target sequence of the targeting domain of the gRNA molecule. Such sites may comprise, for example, 1, 2, 3, 4, 5 or more mismatch nucleotides relative to the sequence of the targeting domain of the gRNA. In exemplary embodiments, such sites are detected using targeted sequencing of in silico predicted off-target sites, or by an insertional method known in the art.

[0477] The term “inhibitory molecule” refers to a molecule, which when activated, causes or contributes to an inhibition of cell survival, activation, proliferation and/or function; and the gene encoding said molecule and its associated regulatory elements, e.g., promoters. In embodiments, an inhibitory molecule is a molecule expressed on an immune effector cell, e.g., on a T cell. Non-limiting examples of inhibitory molecules are PD-1, PD-L1, PD-L2, CTLA4, TIM3, LAG3, CEACAM (e.g., CEACAM-1, CEACAM-3 and/or CEACAM-5), VISTA, BTLA, TIGIT, LAIR1, CD160, 2B4, CD80, CD86, B7-H3 (CD276), B7-H4 (VTCN1), HVEM (TNFRSF14 or CD107), KIR, A2aR, MHC class I, MHC class II, GAL9, adenosine, and TGF beta. It will be understood that the term inhibitory molecule refers to the gene (and its associated regulatory elements) encoding an inhibitory molecule protein when it is used in connection with a target sequence or gRNA molecule. In an embodiment, gene encoding the inhibitory molecule is CD274. In an embodiment, the gene encoding the inhibitory molecule is HAVCR2. In an embodiment, the gene encoding the inhibitory molecule is LAG3. In an embodiment, the gene encoding the inhibitory molecule is PDCD1.

[0478] The term “downstream effector of signaling through an inhibitory molecule” refers to a molecule that mediates the inhibitory effect of an inhibitory molecule; and the gene encoding said molecule and its associated regulatory elements, e.g., promoters. It will be understood that the term downstream effector of signaling through an inhibitory molecule refers to the gene (and its associated regulatory elements) encoding a downstream effector of signaling through an inhibitory molecule protein when it is used in connection with a target sequence or gRNA molecule. In an embodiment, the gene encoding the downstream effector of signaling through an inhibitory molecule is PTPN11.

[0479] The terms “allogeneic T cell target” and “allogeneic T-cell target” are used interchangeably herein, and refer to a protein that mediates or contributes to a host versus graft response, mediates or contributes to a graft versus host response, or is a target for an immunosuppressant; and the gene encoding said molecule and its associated regulatory elements, e.g., promoters. It will be understood that the term allogeneic T cell target refers to the gene (and its associated regulatory elements) encoding an allogeneic T cell target protein when it is used in connection with a target sequence or gRNA molecule. Without being bound by theory, inhibition or elimination of one or more allogeneic T cell targets, e.g., by the methods and compositions disclosed herein, may improve the efficacy, survival, function and/or viability of an allogeneic cell, e.g., an allogeneic T cell, for example, by reducing or eliminating undesirable immunogenicity (such as a host versus graft response or a graft versus host response).

[0480] In a non-limiting example, the protein that mediates or contributes to a graft versus host response or host versus graft response is one or more components of the T cell receptor. In an embodiment, the component of the T cell receptor is the T cell receptor alpha, for example the constant domain of the TCR alpha. In an embodiment, the component of the T cell receptor is the T cell receptor beta chain, for example the constant domain 1 or constant domain 2 of the TCR beta. In an embodiment, the component of the T cell receptor is the T cell receptor delta chain. In an embodiment, the component of the T cell receptor is the T cell receptor epsilon chain. In an embodiment, the component of the T cell receptor is the T cell receptor zeta chain. In an embodiment, the component of the T cell receptor is the T cell receptor gamma chain. Thus, in embodiments where the protein encoded by the allogeneic T cell target is a component of the TCR, the gene encoding the allogeneic T cell target may be, for example, TRAC, TRBC1, TRBC2, CD3D, CD3 E, CD3G or CD247, and combinations thereof.

[0481] In a non-limiting example, the protein that mediates or contributes to a graft versus host response or host versus graft response is an HLA protein or B2M. Examples of HLA proteins include HLA-A, HLA-B and HLA-C. Thus, in embodiments where the allogeneic T cell target protein is a HLA or B2M protein, the gene encoding the allogeneic T cell target may be, for example, HLA-A, HLA-B, HLA-C or B2M, and combinations thereof. In other embodiments, the allogeneic T cell target protein is NLRC5, and the gene encoding the allogeneic T cell target may be, for example, NLRC5.

[0482] In a non-limiting example, the protein that mediates or contributes to a graft versus host response or host versus graft response is a major histocompatibility complex class II (MHC II) molecule (e.g., HLA-Dx (where x refers to a letter of a MHC II protein, e.g., HLA-DM, HLA-DO, HLA-DR, HLA-DQ and/or HLA-DP)), or a regulatory factor for expression of a MHC II, and combinations thereof. A non-limiting example is CIITA (also referred to herein as C2TA). Thus, in embodiments where the allogeneic T cell target protein is a CIITA, the gene encoding the allogeneic T cell target may be, for example, CIITA. In another non-limiting example, the protein that mediates or contributes to a graft versus host response or host versus graft response is RFXANK. In another non-limiting example, the protein that mediates or contributes to a graft versus host response or host versus graft response is RFXAP. In another non-limiting example, the protein that mediates or contributes to a graft versus host response or host versus graft response is RFX5.

[0483] The term “target for an immunosuppressant” as used herein refers to a molecular target, for example a receptor or other protein, for an immunosuppressant agent (the terms, “immunosuppressant” and “immunosuppressive” are used interchangeably herein in connection with an agent, or target for an agent). An immunosuppressant agent is an agent that suppresses immune function by one of several mechanisms of action. In other words, an immunosuppressive agent is a role played by a compound which is exhibited by a capability to diminish the extent and/or voracity of an immune response. One example of a type of activity exhibited by an immunosuppressant agent is the activity of eliminating T-cells, for example, activated T-cells. Another example of a type of activity exhibited by an immunosuppressant agent is the activity of reducing the activity or activation level of T-cells. As a non-limiting example, an immunosuppressive agent can be a calcineurin inhibitor, a target of rapamycin, an interleukin-2 a-chain blocker, an inhibitor of inosine monophosphate dehydrogenase, an inhibitor of dihydrofolic acid reductase, a corticosteroid, cyclosporine, or an immunosuppressive antimetabolite. Classical cytotoxic immunosuppressants act by inhibiting DNA synthesis. Others may act through activation of T-cells or by inhibiting the activation of helper cells. As non limiting examples, targets for immunosuppressive agent can be a receptor for an immunosuppressive agent such as: Deoxycytidine kinase, CD52, glucocorticoid receptor (GR), a FKBP family gene member, e.g., FKBP12, and a cyclophilin family gene member. In an embodiment, the target for an immunosuppressant is deoxycytidine kinase (DCK), and the immunosuppressant is a nucleoside analog-based drug such as cytarabine (cytosine arabinoside) or gemcitabine. In an embodiment, the target for an immunosuppressant is GR, and the immunosuppressant is a corticosteroid such as dexamethasone. In an embodiment, the target for an immunosuppressant is CD52, and the immunosuppressant is an anti-CD52 antibody or antigen-binding fragment thereof such as alemtuzumab (CAMPATH®). In an embodiment, the target for an immunosuppressant is FKBP12, and the immunosuppressant is FK506 (or analog or FKBP12-binding fragment thereof), cyclosporine, rapamycin or rapalog, or mTor inhibitor such as RAD001. Thus, in embodiments where the allogeneic T cell target is a target for an immunosuppressant protein, the gene encoding the allogeneic T cell target may be, for example, NR3C1, FKBP1A, CD52, or DCK, and combinations thereof.

[0484] The term “rapamycin-resistant mTor” refers to an mTor protein (and the gene encoding said mTor protein) which has reduced or eliminated binding to FKBP12 (including in the presence of rapamycin, FK506, a rapalog, cyclosporin and/or other mTor inhibitor such as RAD001). In exemplary embodiments, the rapamycin-resistant mTor comprises one or more mutations to the FRB domain. In an exemplary embodiment, the rapamycin resistant mTor comprises, e.g., consists of, a mutation to S2035, e.g., comprises, e.g., consists of, an S2035I mutation.

[0485] The term “a” and “an” refers to one or to more than one (i.e., to at least one) of the grammatical object of the article. By way of example, “an element” means one element or more than one element.

[0486] The term “about” when referring to a measurable value such as an amount, a temporal duration, and the like, is meant to encompass variations of 20% or in some instances ±10%, or in some instances ±5%, or in some instances ±1%, or in some instances ±0.1% from the specified value, as such variations are appropriate to perform the disclosed methods.

[0487] The term “Chimeric Antigen Receptor” or alternatively a “CAR” refers to a set of polypeptides, typically two in the simplest embodiments, which when in an immune effector cell, provides the cell with specificity for a target cell, typically a cancer cell, and with intracellular signal generation. In some embodiments, a CAR comprises at least an extracellular antigen binding domain, a transmembrane domain and a cytoplasmic signaling domain (also referred to herein as “an intracellular signaling domain”) comprising a functional signaling domain derived from a stimulatory molecule and/or costimulatory molecule as defined below. In some aspects, the set of polypeptides are contiguous with each other. In some embodiments, the set of polypeptides include a dimerization switch that, upon the presence of a dimerization molecule, can couple the polypeptides to one another, e.g., can couple an antigen binding domain to an intracellular signaling domain. In one aspect, the stimulatory molecule is the zeta chain associated with the T cell receptor complex. In one aspect, the cytoplasmic signaling domain further comprises one or more functional signaling domains derived from at least one costimulatory molecule as defined below. In one aspect, the costimulatory molecule is chosen from the costimulatory molecules described herein, e.g., 4 1BB (i.e., CD137), CD27 and/or CD28. In one aspect, the CAR comprises a chimeric fusion protein comprising an extracellular antigen binding domain, a transmembrane domain and an intracellular signaling domain comprising a functional signaling domain derived from a stimulatory molecule. In one aspect, the CAR comprises a chimeric fusion protein comprising an extracellular antigen binding domain, a transmembrane domain and an intracellular signaling domain comprising a functional signaling domain derived from a costimulatory molecule and a functional signaling domain derived from a stimulatory molecule. In one aspect, the CAR comprises a chimeric fusion protein comprising an extracellular antigen binding domain, a transmembrane domain and an intracellular signaling domain comprising two functional signaling domains derived from one or more costimulatory molecule(s) and a functional signaling domain derived from a stimulatory molecule. In one aspect, the CAR comprises a chimeric fusion protein comprising an extracellular antigen binding domain, a transmembrane domain and an intracellular signaling domain comprising at least two functional signaling domains derived from one or more costimulatory molecule(s) and a functional signaling domain derived from a stimulatory molecule. In one aspect the CAR comprises an optional leader sequence at the amino-terminus (N-ter) of the CAR fusion protein. In one aspect, the CAR further comprises a leader sequence at the N-terminus of the extracellular antigen binding domain, wherein the leader sequence is optionally cleaved from the antigen binding domain (e.g., a scFv) during cellular processing and localization of the CAR to the cellular membrane.

[0488] A CAR that comprises an antigen binding domain (e.g., a scFv, or TCR) that targets a specific tumor marker X, such as those described herein, is also referred to as XCAR. For example, a CAR that comprises an antigen binding domain that targets CD19 is referred to as CD19CAR. As another example, a CAR that comprises an antigen binding domain that targets BCMA is referred to as a BCMA CAR.

[0489] The term “signaling domain” refers to the functional portion of a protein which acts by transmitting information within the cell to regulate cellular activity via defined signaling pathways by generating second messengers or functioning as effectors by responding to such messengers.

[0490] The term “antibody,” as used herein, refers to a protein, or polypeptide sequence derived from an immunoglobulin molecule which specifically binds with an antigen. Antibodies can be polyclonal or monoclonal, multiple or single chain, or intact immunoglobulins, and may be derived from natural sources or from recombinant sources. Antibodies can be tetramers of immunoglobulin molecules.

[0491] The term “antibody fragment” refers to at least one portion of an antibody, that retains the ability to specifically interact with (e.g., by binding, steric hinderance, stabilizing/destabilizing, spatial distribution) an epitope of an antigen. Examples of antibody fragments include, but are not limited to, Fab, Fab′, F(ab′)2, Fv fragments, scFv antibody fragments, disulfide-linked Fvs (sdFv), a Fd fragment consisting of the VH and CH1 domains, linear antibodies, single domain antibodies such as sdAb (either VL or VH), camelid VHH domains, multi-specific antibodies formed from antibody fragments such as a bivalent fragment comprising two Fab fragments linked by a disulfide bridge at the hinge region, and an isolated CDR or other epitope binding fragments of an antibody. An antigen binding fragment can also be incorporated into single domain antibodies, maxibodies, minibodies, nanobodies, intrabodies, diabodies, triabodies, tetrabodies, v-NAR and bis-scFv (see, e.g., Hollinger and Hudson, Nature Biotechnology 23:1126-1136, 2005). Antigen binding fragments can also be grafted into scaffolds based on polypeptides such as a fibronectin type III (Fn3)(see U.S. Pat. No. 6,703,199, which describes fibronectin polypeptide minibodies).

[0492] The term “scFv” refers to a fusion protein comprising at least one antibody fragment comprising a variable region of a light chain and at least one antibody fragment comprising a variable region of a heavy chain, wherein the light and heavy chain variable regions are contiguously linked, e.g., via a synthetic linker, e.g., a short flexible polypeptide linker, and capable of being expressed as a single chain polypeptide, and wherein the scFv retains the specificity of the intact antibody from which it is derived. Unless specified, as used herein an scFv may have the VL and VH variable regions in either order, e.g., with respect to the N-terminal and C-terminal ends of the polypeptide, the scFv may comprise VL-linker-VH or may comprise VH-linker-VL.

[0493] The portion of the CAR of the invention comprising an antibody or antibody fragment thereof may exist in a variety of forms where the antigen binding domain is expressed as part of a contiguous polypeptide chain including, for example, a single domain antibody fragment (sdAb), a single chain antibody (scFv), a humanized antibody or bispecific antibody (Harlow et al., 1999, In: Using Antibodies: A Laboratory Manual, Cold Spring Harbor Laboratory Press, NY; Harlow et al., 1989, In: Antibodies: A Laboratory Manual, Cold Spring Harbor, New York; Houston et al., 1988, Proc. Natl. Acad. Sci. USA 85:5879-5883; Bird et al., 1988, Science 242:423-426). In one aspect, the antigen binding domain of a CAR composition of the invention comprises an antibody fragment. In a further aspect, the CAR comprises an antibody fragment that comprises a scFv. The precise amino acid sequence boundaries of a given CDR can be determined using any of a number of well-known schemes, including those described by Kabat et al. (1991), “Sequences of Proteins of Immunological Interest,” 5th Ed. Public Health Service, National Institutes of Health, Bethesda, MD (“Kabat” numbering scheme), A1-Lazikani et al., (1997) JMB 273,927-948 (“Chothia” numbering scheme), or a combination thereof.

[0494] As used herein, the term “binding domain” or “antibody molecule” refers to a protein, e.g., an immunoglobulin chain or fragment thereof, comprising at least one immunoglobulin variable domain sequence. The term “binding domain” or “antibody molecule” encompasses antibodies and antibody fragments. In an embodiment, an antibody molecule is a multispecific antibody molecule, e.g., it comprises a plurality of immunoglobulin variable domain sequences, wherein a first immunoglobulin variable domain sequence of the plurality has binding specificity for a first epitope and a second immunoglobulin variable domain sequence of the plurality has binding specificity for a second epitope. In an embodiment, a multispecific antibody molecule is a bispecific antibody molecule. A bispecific antibody has specificity for no more than two antigens. A bispecific antibody molecule is characterized by a first immunoglobulin variable domain sequence which has binding specificity for a first epitope and a second immunoglobulin variable domain sequence that has binding specificity for a second epitope.

[0495] The portion of the CAR of the invention comprising an antibody or antibody fragment thereof may exist in a variety of forms where the antigen binding domain is expressed as part of a contiguous polypeptide chain including, for example, a single domain antibody fragment (sdAb), a single chain antibody (scFv), a humanized antibody, or bispecific antibody (Harlow et al., 1999, In: Using Antibodies: A Laboratory Manual, Cold Spring Harbor Laboratory Press, NY; Harlow et al., 1989, In: Antibodies: A Laboratory Manual, Cold Spring Harbor, New York; Houston et al., 1988, Proc. Natl. Acad. Sci. USA 85:5879-5883; Bird et al., 1988, Science 242:423-426). In one aspect, the antigen binding domain of a CAR composition of the invention comprises an antibody fragment. In a further aspect, the CAR comprises an antibody fragment that comprises a scFv.

[0496] The term “antibody heavy chain,” refers to the larger of the two types of polypeptide chains present in antibody molecules in their naturally occurring conformations, and which normally determines the class to which the antibody belongs.

[0497] The term “antibody light chain,” refers to the smaller of the two types of polypeptide chains present in antibody molecules in their naturally occurring conformations. Kappa (□) and lambda (□) light chains refer to the two major antibody light chain isotypes.

[0498] The term “recombinant antibody” refers to an antibody which is generated using recombinant DNA technology, such as, for example, an antibody expressed by a bacteriophage or yeast expression system. The term should also be construed to mean an antibody which has been generated by the synthesis of a DNA molecule encoding the antibody and which DNA molecule expresses an antibody protein, or an amino acid sequence specifying the antibody, wherein the DNA or amino acid sequence has been obtained using recombinant DNA or amino acid sequence technology which is available and well known in the art.

[0499] The term “antigen” or “Ag” refers to a molecule that provokes an immune response. This immune response may involve either antibody production, or the activation of specific immunologically-competent cells, or both. The skilled artisan will understand that any macromolecule, including virtually all proteins or peptides, can serve as an antigen. Furthermore, antigens can be derived from recombinant or genomic DNA. A skilled artisan will understand that any DNA, which comprises a nucleotide sequences or a partial nucleotide sequence encoding a protein that elicits an immune response therefore encodes an “antigen” as that term is used herein. Furthermore, one skilled in the art will understand that an antigen need not be encoded solely by a full length nucleotide sequence of a gene. It is readily apparent that the present invention includes, but is not limited to, the use of partial nucleotide sequences of more than one gene and that these nucleotide sequences are arranged in various combinations to encode polypeptides that elicit the desired immune response. Moreover, a skilled artisan will understand that an antigen need not be encoded by a “gene” at all. It is readily apparent that an antigen can be generated synthesized or can be derived from a biological sample, or might be macromolecule besides a polypeptide. Such a biological sample can include, but is not limited to a tissue sample, a tumor sample, a cell or a fluid with other biological components.

[0500] The term “anti-cancer effect” refers to a biological effect which can be manifested by various means, including but not limited to, e.g., a decrease in tumor volume, a decrease in the number of cancer cells, a decrease in the number of metastases, an increase in life expectancy, decrease in cancer cell proliferation, decrease in cancer cell survival, or amelioration of various physiological symptoms associated with the cancerous condition. An “anti-cancer effect” can also be manifested by the ability of the peptides, polynucleotides, cells and antibodies in prevention of the occurrence of cancer in the first place. The term “anti-tumor effect” refers to a biological effect which can be manifested by various means, including but not limited to, e.g., a decrease in tumor volume, a decrease in the number of tumor cells, a decrease in tumor cell proliferation, or a decrease in tumor cell survival.

[0501] The term “autologous” refers to any material derived from the same individual into whom it is later to be re-introduced.

[0502] The term “allogeneic” refers to any material derived from a different animal of the same species as the individual to whom the material is introduced. Two or more individuals are said to be allogeneic to one another when the genes at one or more loci are not identical. In some aspects, allogeneic material from individuals of the same species may be sufficiently unlike genetically to interact antigenically

[0503] The term “xenogeneic” refers to a graft derived from an animal of a different species.

[0504] The term “cancer” refers to a disease characterized by the uncontrolled growth of aberrant cells. Cancer cells can spread locally or through the bloodstream and lymphatic system to other parts of the body. Examples of various cancers are described herein and include but are not limited to, breast cancer, prostate cancer, ovarian cancer, cervical cancer, skin cancer, pancreatic cancer, colorectal cancer, renal cancer, liver cancer, brain cancer, lymphoma, leukemia, lung cancer and the like. The terms “tumor” and “cancer” are used interchangeably herein, e.g., both terms encompass solid and liquid, e.g., diffuse or circulating, tumors. As used herein, the term “cancer” or “tumor” includes premalignant, as well as malignant cancers and tumors.

[0505] “Derived from” as that term is used herein, indicates a relationship between a first and a second molecule. It generally refers to structural similarity between the first molecule and a second molecule and does not connotate or include a process or source limitation on a first molecule that is derived from a second molecule. For example, in the case of an intracellular signaling domain that is derived from a CD3zeta molecule, the intracellular signaling domain retains sufficient CD3zeta structure such that is has the required function, namely, the ability to generate a signal under the appropriate conditions. It does not connotate or include a limitation to a particular process of producing the intracellular signaling domain, e.g., it does not mean that, to provide the intracellular signaling domain, one must start with a CD3zeta sequence and delete unwanted sequence, or impose mutations, to arrive at the intracellular signaling domain.

[0506] The phrase “disease associated with expression of a tumor antigen as described herein” includes, but is not limited to, a disease associated with expression of a tumor antigen as described herein or condition associated with cells which express a tumor antigen as described herein including, e.g., proliferative diseases such as a cancer or malignancy or a precancerous condition such as a myelodysplasia, a myelodysplastic syndrome or a preleukemia; or a noncancer related indication associated with cells which express a tumor antigen as described herein. In one aspect, a cancer associated with expression of a tumor antigen as described herein is a hematological cancer. In one aspect, a cancer associated with expression of a tumor antigen as described herein is a solid cancer. Further diseases associated with expression of a tumor antigen described herein include, but not limited to, e.g., atypical and/or non-classical cancers, malignancies, precancerous conditions or proliferative diseases associated with expression of a tumor antigen as described herein. Non-cancer related indications associated with expression of a tumor antigen as described herein include, but are not limited to, e.g., autoimmune disease, (e.g., lupus), inflammatory disorders (allergy and asthma) and transplantation. In some embodiments, the tumor antigen-expressing cells express, or at any time expressed, mRNA encoding the tumor antigen. In an embodiment, the tumor antigen-expressing cells produce the tumor antigen protein (e.g., wild-type or mutant), and the tumor antigen protein may be present at normal levels or reduced levels. In an embodiment, the tumor antigen-expressing cells produced detectable levels of a tumor antigen protein at one point, and subsequently produced substantially no detectable tumor antigen protein.

[0507] The term “conservative sequence modifications” refers to amino acid modifications that do not significantly affect or alter the binding characteristics of the antibody or antibody fragment containing the amino acid sequence. Such conservative modifications include amino acid substitutions, additions and deletions. Modifications can be introduced into an antibody or antibody fragment of the invention by standard techniques known in the art, such as site-directed mutagenesis and PCR-mediated mutagenesis. Conservative amino acid substitutions are ones in which the amino acid residue is replaced with an amino acid residue having a similar side chain. Families of amino acid residues having similar side chains have been defined in the art. These families include amino acids with basic side chains (e.g., lysine, arginine, histidine), acidic side chains (e.g., aspartic acid, glutamic acid), uncharged polar side chains (e.g., glycine, asparagine, glutamine, serine, threonine, tyrosine, cysteine, tryptophan), nonpolar side chains (e.g., alanine, valine, leucine, isoleucine, proline, phenylalanine, methionine), beta-branched side chains (e.g., threonine, valine, isoleucine) and aromatic side chains (e.g., tyrosine, phenylalanine, tryptophan, histidine). Thus, one or more amino acid residues within a CAR of the invention can be replaced with other amino acid residues from the same side chain family and the altered CAR can be tested using the functional assays described herein.

[0508] The term “stimulation,” refers to a primary response induced by binding of a stimulatory molecule (e.g., a TCR/CD3 complex or CAR) with its cognate ligand (or tumor antigen in the case of a CAR) thereby mediating a signal transduction event, such as, but not limited to, signal transduction via the TCR/CD3 complex or signal transduction via the appropriate NK receptor or signaling domains of the CAR. Stimulation can mediate altered expression of certain molecules.

[0509] The term “stimulatory molecule,” refers to a molecule expressed by an immune cell (e.g., T cell, NK cell, B cell) that provides the cytoplasmic signaling sequence(s) that regulate activation of the immune cell in a stimulatory way for at least some aspect of the immune cell signaling pathway. In one aspect, the signal is a primary signal that is initiated by, for instance, binding of a TCR/CD3 complex with an MHC molecule loaded with peptide, and which leads to mediation of a T cell response, including, but not limited to, proliferation, activation, differentiation, and the like. A primary cytoplasmic signaling sequence (also referred to as a “primary signaling domain”) that acts in a stimulatory manner may contain a signaling motif which is known as immunoreceptor tyrosine-based activation motif or ITAM. Examples of an ITAM containing cytoplasmic signaling sequence that is of particular use in the invention includes, but is not limited to, those derived from CD3 zeta, common FcR gamma (FCER1G), Fc gamma RIIa, FcR beta (Fc Epsilon R1b), CD3 gamma, CD3 delta, CD3 epsilon, CD79a, CD79b, DAP10, and DAP12. In a specific CAR of the invention, the intracellular signaling domain in any one or more CARS of the invention comprises an intracellular signaling sequence, e.g., a primary signaling sequence of CD3-zeta. In a specific CAR of the invention, the primary signaling sequence of CD3-zeta is the sequence provided as SEQ ID NO: 18, or the equivalent residues from a non-human species, e.g., mouse, rodent, monkey, ape and the like. In a specific CAR of the invention, the primary signaling sequence of CD3-zeta is the sequence as provided in SEQ ID NO:20, or the equivalent residues from a non-human species, e.g., mouse, rodent, monkey, ape and the like.

[0510] The term “antigen presenting cell” or “APC” refers to an immune system cell such as an accessory cell (e.g., a B-cell, a dendritic cell, and the like) that displays a foreign antigen complexed with major histocompatibility complexes (MHC's) on its surface. T-cells may recognize these complexes using their T-cell receptors (TCRs). APCs process antigens and present them to T-cells.

[0511] An “intracellular signaling domain,” as the term is used herein, refers to an intracellular portion of a molecule. The intracellular signaling domain generates a signal that promotes an immune effector function of the CAR containing cell, e.g., a CART cell. Examples of immune effector function, e.g., in a CART cell, include cytolytic activity and helper activity, including the secretion of cytokines.

[0512] In an embodiment, the intracellular signaling domain can comprise a primary intracellular signaling domain. Exemplary primary intracellular signaling domains include those derived from the molecules responsible for primary stimulation, or antigen dependent simulation. In an embodiment, the intracellular signaling domain can comprise a costimulatory intracellular domain. Exemplary costimulatory intracellular signaling domains include those derived from molecules responsible for costimulatory signals, or antigen independent stimulation. For example, in the case of a CART, a primary intracellular signaling domain can comprise a cytoplasmic sequence of a T cell receptor, and a costimulatory intracellular signaling domain can comprise cytoplasmic sequence from co-receptor or costimulatory molecule.

[0513] A primary intracellular signaling domain can comprise a signaling motif which is known as an immunoreceptor tyrosine-based activation motif or ITAM. Examples of ITAM containing primary cytoplasmic signaling sequences include, but are not limited to, those derived from CD3 zeta, common FcR gamma (FCER1G), Fc gamma RIIa, FcR beta (Fc Epsilon R1b), CD3 gamma, CD3 delta, CD3 epsilon, CD79a, CD79b, DAP10, and DAP12.

[0514] The term “zeta” or alternatively “zeta chain”, “CD3-zeta” or “TCR-zeta” is defined as the protein provided as GenBan Acc. No. BAG36664.1, or the equivalent residues from a non-human species, e.g., mouse, rodent, monkey, ape and the like, and a “zeta stimulatory domain” or alternatively a “CD3-zeta stimulatory domain” or a “TCR-zeta stimulatory domain” is defined as the amino acid residues from the cytoplasmic domain of the zeta chain, or functional derivatives thereof, that are sufficient to functionally transmit an initial signal necessary for T cell activation. In one aspect the cytoplasmic domain of zeta comprises residues 52 through 164 of GenBank Acc. No. BAG36664.1 or the equivalent residues from a non-human species, e.g., mouse, rodent, monkey, ape and the like, that are functional orthologs thereof. In one aspect, the “zeta stimulatory domain” or a “CD3-zeta stimulatory domain” is the sequence provided as SEQ ID NO: 18. In one aspect, the “zeta stimulatory domain” or a “CD3-zeta stimulatory domain” is the sequence provided as SEQ ID NO:20.

[0515] The term a “costimulatory molecule” refers to a cognate binding partner on a T cell that specifically binds with a costimulatory ligand, thereby mediating a costimulatory response by the T cell, such as, but not limited to, proliferation. Costimulatory molecules are cell surface molecules other than antigen receptors or their ligands that are contribute to an efficient immune response. Costimulatory molecules include, but are not limited to an MHC class I molecule, BTLA and a Toll ligand receptor, as well as OX40, CD27, CD28, CDS, ICAM-1, LFA-1 (CD11a/CD18), ICOS (CD278), and 4-1BB (CD137). Further examples of such costimulatory molecules include CDS, ICAM-1, GITR, BAFFR, HVEM (LIGHTR), SLAMF7, NKp80 (KLRF1), NKp44, NKp30, NKp46, CD160, CD19, CD4, CD8alpha, CD8beta, IL2Rbeta, IL2R gamma, IL7R alpha, ITGA4, VLA1, CD49a, ITGA4, IA4, CD49D, ITGA6, VLA-6, CD49f, ITGAD, CD11d, ITGAE, CD103, ITGAL, CD11a, LFA-1, ITGAM, CD11b, ITGAX, CD11c, ITGB1, CD29, ITGB2, CD18, LFA-1, ITGB7, NKG2D, NKG2C, TNFR2, TRANCE/RANKL, DNAM1 (CD226), SLAMF4 (CD244, 2B4), CD84, CD96 (Tactile), CEACAM1, CRTAM, Ly9 (CD229), CD160 (BY55), PSGL1, CD100 (SEMA4D), CD69, SLAMF6 (NTB-A, Ly108), SLAM (SLAMF1, CD150, IPO-3), BLAME (SLAMF8), SELPLG (CD162), LTBR, LAT, GADS, SLP-76, PAG/Cbp, CD19a, and a ligand that specifically binds with CD83.

[0516] A costimulatory intracellular signaling domain can be the intracellular portion of a costimulatory molecule. A costimulatory molecule can be represented in the following protein families: TNF receptor proteins, Immunoglobulin-like proteins, cytokine receptors, integrins, signaling lymphocytic activation molecules (SLAM proteins), and activating NK cell receptors. Examples of such molecules include CD27, CD28, 4-1BB (CD137), OX40, GITR, CD30, CD40, ICOS, BAFFR, HVEM, ICAM-1, lymphocyte function-associated antigen-1 (LFA-1), CD2, CDS, CD7, CD287, LIGHT, NKG2C, NKG2D, SLAMF7, NKp80, NKp30, NKp44, NKp46, CD160, B7-H3, and a ligand that specifically binds with CD83, and the like.

[0517] The intracellular signaling domain can comprise the entire intracellular portion, or the entire native intracellular signaling domain, of the molecule from which it is derived, or a functional fragment or derivative thereof.

[0518] The term “4-1BB” refers to a member of the TNFR superfamily with an amino acid sequence provided as GenBank Acc. No. AAA62478.2, or the equivalent residues from a non-human species, e.g., mouse, rodent, monkey, ape and the like; and a “4-1BB costimulatory domain” is defined as amino acid residues 214-255 of GenBank Acc. No. AAA62478.2, or the equivalent residues from a non-human species, e.g., mouse, rodent, monkey, ape and the like. In one aspect, the “4-1BB costimulatory domain” is the sequence provided as SEQ ID NO:14 or the equivalent residues from a non-human species, e.g., mouse, rodent, monkey, ape and the like.

[0519] “Immune effector cell,” as that term is used herein, refers to a cell that is involved in an immune response, e.g., in the promotion of an immune effector response. Examples of immune effector cells include T cells, e.g., alpha/beta T cells and gamma/delta T cells, B cells, natural killer (NK) cells, natural killer T (NKT) cells, mast cells, and myeloic-derived phagocytes.

[0520] “Immune effector function or immune effector response,” as that term is used herein, refers to function or response, e.g., of an immune effector cell, that enhances or promotes an immune attack of a target cell. E.g., an immune effector function or response refers a property of a T or NK cell that promotes killing or the inhibition of growth or proliferation, of a target cell. In the case of a T cell, primary stimulation and co-stimulation are examples of immune effector function or response.

[0521] The term “encoding” refers to the inherent property of specific sequences of nucleotides in a polynucleotide, such as a gene, a cDNA, or an mRNA, to serve as templates for synthesis of other polymers and macromolecules in biological processes having either a defined sequence of nucleotides (e.g., rRNA, tRNA and mRNA) or a defined sequence of amino acids and the biological properties resulting therefrom. Thus, a gene, cDNA, or RNA, encodes a protein if transcription and translation of mRNA corresponding to that gene produces the protein in a cell or other biological system. Both the coding strand, the nucleotide sequence of which is identical to the mRNA sequence and is usually provided in sequence listings, and the non-coding strand, used as the template for transcription of a gene or cDNA, can be referred to as encoding the protein or other product of that gene or cDNA.

[0522] Unless otherwise specified, a “nucleotide sequence encoding an amino acid sequence” includes all nucleotide sequences that are degenerate versions of each other and that encode the same amino acid sequence. The phrase nucleotide sequence that encodes a protein or a RNA may also include introns to the extent that the nucleotide sequence encoding the protein may in some version contain an intron(s).

[0523] The term “effective amount” or “therapeutically effective amount” are used interchangeably herein, and refer to an amount of a compound, formulation, material, or composition, as described herein effective to achieve a particular biological result.

[0524] The term “endogenous” refers to any material from or produced inside an organism, cell, tissue or system.

[0525] The term “exogenous” refers to any material introduced from or produced outside an organism, cell, tissue or system.

[0526] The term “expression” refers to the transcription and/or translation of a particular nucleotide sequence driven by a promoter.

[0527] The term “transfer vector” refers to a composition of matter which comprises an isolated nucleic acid and which can be used to deliver the isolated nucleic acid to the interior of a cell. Numerous vectors are known in the art including, but not limited to, linear polynucleotides, polynucleotides associated with ionic or amphiphilic compounds, plasmids, and viruses. Thus, the term “transfer vector” includes an autonomously replicating plasmid or a virus. The term should also be construed to further include non-plasmid and non-viral compounds which facilitate transfer of nucleic acid into cells, such as, for example, a polylysine compound, liposome, and the like. Examples of viral transfer vectors include, but are not limited to, adenoviral vectors, adeno-associated virus vectors, retroviral vectors, lentiviral vectors, and the like.

[0528] The term “expression vector” refers to a vector comprising a recombinant polynucleotide comprising expression control sequences operatively linked to a nucleotide sequence to be expressed. An expression vector comprises sufficient cis-acting elements for expression; other elements for expression can be supplied by the host cell or in an in vitro expression system. Expression vectors include all those known in the art, including cosmids, plasmids (e.g., naked or contained in liposomes) and viruses (e.g., lentiviruses, retroviruses, adenoviruses, and adeno-associated viruses) that incorporate the recombinant polynucleotide.

[0529] The term “homologous” or “identity” refers to the subunit sequence identity between two polymeric molecules, e.g., between two nucleic acid molecules, such as, two DNA molecules or two RNA molecules, or between two polypeptide molecules. When a subunit position in both of the two molecules is occupied by the same monomeric subunit; e.g., if a position in each of two DNA molecules is occupied by adenine, then they are homologous or identical at that position. The homology between two sequences is a direct function of the number of matching or homologous positions; e.g., if half (e.g., five positions in a polymer ten subunits in length) of the positions in two sequences are homologous, the two sequences are 50% homologous; if 90% of the positions (e.g., 9 of 10), are matched or homologous, the two sequences are 90% homologous.

[0530] “Humanized” forms of non-human (e.g., murine) antibodies are chimeric immunoglobulins, immunoglobulin chains or fragments thereof (such as Fv, Fab, Fab′, F(ab′)2 or other antigen-binding subsequences of antibodies) which contain minimal sequence derived from non-human immunoglobulin. For the most part, humanized antibodies and antibody fragments thereof are human immunoglobulins (recipient antibody or antibody fragment) in which residues from a complementary-determining region (CDR) of the recipient are replaced by residues from a CDR of a non-human species (donor antibody) such as mouse, rat or rabbit having the desired specificity, affinity, and capacity. In some instances, Fv framework region (FR) residues of the human immunoglobulin are replaced by corresponding non-human residues. Furthermore, a humanized antibody/antibody fragment can comprise residues which are found neither in the recipient antibody nor in the imported CDR or framework sequences. These modifications can further refine and optimize antibody or antibody fragment performance. In general, the humanized antibody or antibody fragment thereof will comprise substantially all of at least one, and typically two, variable domains, in which all or substantially all of the CDR regions correspond to those of a non-human immunoglobulin and all or a significant portion of the FR regions are those of a human immunoglobulin sequence. The humanized antibody or antibody fragment can also comprise at least a portion of an immunoglobulin constant region (Fc), typically that of a human immunoglobulin. For further details, see Jones et al., Nature, 321: 522-525, 1986; Reichmann et al., Nature, 332: 323-329, 1988; Presta, Curr. Op. Struct. Biol., 2: 593-596, 1992.

[0531] “Fully human” refers to an immunoglobulin, such as an antibody or antibody fragment, where the whole molecule is of human origin or consists of an amino acid sequence identical to a human form of the antibody or immunoglobulin.

[0532] The term “isolated” means altered or removed from the natural state. For example, a nucleic acid or a peptide naturally present in a living animal is not “isolated,” but the same nucleic acid or peptide partially or completely separated from the coexisting materials of its natural state is “isolated.” An isolated nucleic acid or protein can exist in substantially purified form, or can exist in a non-native environment such as, for example, a host cell.

[0533] The term “operably linked” or “transcriptional control” refers to functional linkage between a regulatory sequence and a heterologous nucleic acid sequence resulting in expression of the latter. For example, a first nucleic acid sequence is operably linked with a second nucleic acid sequence when the first nucleic acid sequence is placed in a functional relationship with the second nucleic acid sequence. For instance, a promoter is operably linked to a coding sequence if the promoter affects the transcription or expression of the coding sequence. Operably linked DNA sequences can be contiguous with each other and, e.g., where necessary to join two protein coding regions, are in the same reading frame.

[0534] The term “parenteral” administration of an immunogenic composition includes, e.g., subcutaneous (s.c.), intravenous (i.v.), intramuscular (i.m.), or intrasternal injection, intratumoral, or infusion techniques.

[0535] The term “nucleic acid” or “polynucleotide” refers to deoxyribonucleic acids (DNA) or ribonucleic acids (RNA) and polymers thereof in either single- or double-stranded form. Unless specifically limited, the term encompasses nucleic acids containing known analogues of natural nucleotides that have similar binding properties as the reference nucleic acid and are metabolized in a manner similar to naturally occurring nucleotides. Unless otherwise indicated, a particular nucleic acid sequence also implicitly encompasses conservatively modified variants thereof (e.g., degenerate codon substitutions), alleles, orthologs, SNPs, and complementary sequences as well as the sequence explicitly indicated. Specifically, degenerate codon substitutions may be achieved by generating sequences in which the third position of one or more selected (or all) codons is substituted with mixed-base and/or deoxyinosine residues (Batzer et al., Nucleic Acid Res. 19:5081 (1991); Ohtsuka et al., J. Biol. Chem. 260:2605-2608 (1985); and Rossolini et al., Mol. Cell. Probes 8:91-98 (1994)).

[0536] The terms “peptide,” “polypeptide,” and “protein” are used interchangeably, and refer to a compound comprised of amino acid residues covalently linked by peptide bonds. A protein or peptide must contain at least two amino acids, and no limitation is placed on the maximum number of amino acids that can comprise a protein's or peptide's sequence. Polypeptides include any peptide or protein comprising two or more amino acids joined to each other by peptide bonds. As used herein, the term refers to both short chains, which also commonly are referred to in the art as peptides, oligopeptides and oligomers, for example, and to longer chains, which generally are referred to in the art as proteins, of which there are many types. “Polypeptides” include, for example, biologically active fragments, substantially homologous polypeptides, oligopeptides, homodimers, heterodimers, variants of polypeptides, modified polypeptides, derivatives, analogs, fusion proteins, among others. A polypeptide includes a natural peptide, a recombinant peptide, or a combination thereof.

[0537] The term “promoter” refers to a DNA sequence recognized by the synthetic machinery of the cell, or introduced synthetic machinery, required to initiate the specific transcription of a polynucleotide sequence.

[0538] The term “promoter/regulatory sequence” refers to a nucleic acid sequence which is required for expression of a gene product operably linked to the promoter/regulatory sequence. In some instances, this sequence may be the core promoter sequence and in other instances, this sequence may also include an enhancer sequence and other regulatory elements which are required for expression of the gene product. The promoter/regulatory sequence may, for example, be one which expresses the gene product in a tissue specific manner.

[0539] The term “constitutive” promoter refers to a nucleotide sequence which, when operably linked with a polynucleotide which encodes or specifies a gene product, causes the gene product to be produced in a cell under most or all physiological conditions of the cell.

[0540] The term “inducible” promoter refers to a nucleotide sequence which, when operably linked with a polynucleotide which encodes or specifies a gene product, causes the gene product to be produced in a cell substantially only when an inducer which corresponds to the promoter is present in the cell.

[0541] The term “tissue-specific” promoter refers to a nucleotide sequence which, when operably linked with a polynucleotide encodes or specified by a gene, causes the gene product to be produced in a cell substantially only if the cell is a cell of the tissue type corresponding to the promoter.

[0542] The terms “cancer associated antigen” or “tumor antigen” interchangeably refers to a molecule (typically a protein, carbohydrate or lipid) that is expressed on the surface of a cancer cell, either entirely or as a fragment (e.g., MHC/peptide), and which is useful for the preferential targeting of a pharmacological agent to the cancer cell. In some embodiments, a tumor antigen is a marker expressed by both normal cells and cancer cells, e.g., a lineage marker, e.g., CD19 on B cells. In some embodiments, a tumor antigen is a cell surface molecule that is overexpressed in a cancer cell in comparison to a normal cell, for instance, 1-fold over expression, 2-fold overexpression, 3-fold overexpression or more in comparison to a normal cell. In some embodiments, a tumor antigen is a cell surface molecule that is inappropriately synthesized in the cancer cell, for instance, a molecule that contains deletions, additions or mutations in comparison to the molecule expressed on a normal cell. In some embodiments, a tumor antigen will be expressed exclusively on the cell surface of a cancer cell, entirely or as a fragment (e.g., MHC/peptide), and not synthesized or expressed on the surface of a normal cell. In some embodiments, the CARs of the present invention includes CARs comprising an antigen binding domain (e.g., antibody or antibody fragment) that binds to a MHC presented peptide. Normally, peptides derived from endogenous proteins fill the pockets of Major histocompatibility complex (MHC) class I molecules, and are recognized by T cell receptors (TCRs) on CD8+ T lymphocytes. The MHC class I complexes are constitutively expressed by all nucleated cells. In cancer, virus-specific and/or tumor-specific peptide/MHC complexes represent a unique class of cell surface targets for immunotherapy. TCR-like antibodies targeting peptides derived from viral or tumor antigens in the context of human leukocyte antigen (HLA)-A1 or HLA-A2 have been described (see, e.g., Sastry et al., J Virol. 2011 85(5):1935-1942; Sergeeva et al., Blood, 2011 117(16):4262-4272; Verma et al., J Immunol 2010 184(4):2156-2165; Willemsen et al., Gene Ther 2001 8(21):1601-1608; Dao et al., Sci Transl Med 2013 5(176):176ra33; Tassev et al., Cancer Gene Ther 2012 19(2):84-100). For example, TCR-like antibody can be identified from screening a library, such as a human scFv phage displayed library.

[0543] The term “tumor-supporting antigen” or “cancer-supporting antigen” interchangeably refer to a molecule (typically a protein, carbohydrate or lipid) that is expressed on the surface of a cell that is, itself, not cancerous, but supports the cancer cells, e.g., by promoting their growth or survival e.g., resistance to immune cells. Exemplary cells of this type include stromal cells and myeloid-derived suppressor cells (MDSCs). The tumor-supporting antigen itself need not play a role in supporting the tumor cells so long as the antigen is present on a cell that supports cancer cells.

[0544] The term “flexible polypeptide linker” or “linker” as used in the context of a scFv refers to a peptide linker that consists of amino acids such as glycine and/or serine residues used alone or in combination, to link variable heavy and variable light chain regions together. In one embodiment, the flexible polypeptide linker is a Gly/Ser linker and comprises the amino acid sequence (Gly-Gly-Gly-Ser)n, where n is a positive integer equal to or greater than 1. For example, n=1, n=2, n=3, n=4, n=5 and n=6, n=7, n=8, n=9 and n=10 (SEQ ID NO:6592). In one embodiment, the flexible polypeptide linkers include, but are not limited to, (Gly4 Ser)4 (SEQ ID NO:6593) or (Gly4 Ser)3 (SEQ ID NO:6594). In another embodiment, the linkers include multiple repeats of (Gly2Ser), (GlySer) or (Gly3Ser) (SEQ ID NO:6595). Also included within the scope of the invention are linkers described in WO2012/138475, incorporated herein by reference).

[0545] As used herein in connection with a messenger RNA (mRNA), a 5′ cap (also termed an RNA cap, an RNA 7-methylguanosine cap or an RNA m7G cap) is a modified guanine nucleotide that has been added to the “front” or 5′ end of a eukaryotic messenger RNA shortly after the start of transcription. The 5′ cap consists of a terminal group which is linked to the first transcribed nucleotide. Its presence is critical for recognition by the ribosome and protection from RNases. Cap addition is coupled to transcription, and occurs co-transcriptionally, such that each influences the other. Shortly after the start of transcription, the 5′ end of the mRNA being synthesized is bound by a cap-synthesizing complex associated with RNA polymerase. This enzymatic complex catalyzes the chemical reactions that are required for mRNA capping. Synthesis proceeds as a multi-step biochemical reaction. The capping moiety can be modified to modulate functionality of mRNA such as its stability or efficiency of translation.

[0546] As used herein, “in vitro transcribed RNA” refers to RNA, preferably mRNA, that has been synthesized in vitro. Generally, the in vitro transcribed RNA is generated from an in vitro transcription vector. The in vitro transcription vector comprises a template that is used to generate the in vitro transcribed RNA.

[0547] As used herein, a “poly(A)” is a series of adenosines attached by polyadenylation to the mRNA. In the preferred embodiment of a construct for transient expression, the polyA is between 50 and 5000 (SEQ ID NO: 6596), preferably greater than 64, more preferably greater than 100, most preferably greater than 300 or 400. poly(A) sequences can be modified chemically or enzymatically to modulate mRNA functionality such as localization, stability or efficiency of translation.

[0548] As used herein, “polyadenylation” refers to the covalent linkage of a polyadenylyl moiety, or its modified variant, to a messenger RNA molecule. In eukaryotic organisms, most messenger RNA (mRNA) molecules are polyadenylated at the 3′ end. The 3′ poly(A) tail is a long sequence of adenine nucleotides (often several hundred) added to the pre-mRNA through the action of an enzyme, polyadenylate polymerase. In higher eukaryotes, the poly(A) tail is added onto transcripts that contain a specific sequence, the polyadenylation signal. The poly(A) tail and the protein bound to it aid in protecting mRNA from degradation by exonucleases. Polyadenylation is also important for transcription termination, export of the mRNA from the nucleus, and translation. Polyadenylation occurs in the nucleus immediately after transcription of DNA into RNA, but additionally can also occur later in the cytoplasm. After transcription has been terminated, the mRNA chain is cleaved through the action of an endonuclease complex associated with RNA polymerase. The cleavage site is usually characterized by the presence of the base sequence AAUAAA near the cleavage site. After the mRNA has been cleaved, adenosine residues are added to the free 3′ end at the cleavage site.

[0549] As used herein, “transient” refers to expression of a non-integrated transgene for a period of hours, days or weeks, wherein the period of time of expression is less than the period of time for expression of the gene if integrated into the genome or contained within a stable plasmid replicon in the host cell.

[0550] As used herein, the terms “treat”, “treatment” and “treating” refer to the reduction or amelioration of the progression, severity and/or duration of a proliferative disorder, or the amelioration of one or more symptoms (preferably, one or more discernible symptoms) of a proliferative disorder resulting from the administration of one or more therapies (e.g., one or more therapeutic agents such as a CAR of the invention). In specific embodiments, the terms “treat”, “treatment” and “treating” refer to the amelioration of at least one measurable physical parameter of a proliferative disorder, such as growth of a tumor, not necessarily discernible by the patient. In other embodiments the terms “treat”, “treatment” and “treating”-refer to the inhibition of the progression of a proliferative disorder, either physically by, e.g., stabilization of a discernible symptom, physiologically by, e.g., stabilization of a physical parameter, or both. In other embodiments the terms “treat”, “treatment” and “treating” refer to the reduction or stabilization of tumor size or cancerous cell count.

[0551] The term “signal transduction pathway” refers to the biochemical relationship between a variety of signal transduction molecules that play a role in the transmission of a signal from one portion of a cell to another portion of a cell. The phrase “cell surface receptor” includes molecules and complexes of molecules capable of receiving a signal and transmitting signal across the membrane of a cell.

[0552] The term “subject” is intended to include living organisms in which an immune response can be elicited (e.g., mammals, human).

[0553] The term, a “substantially purified” cell refers to a cell that is essentially free of other cell types. A substantially purified cell also refers to a cell which has been separated from other cell types with which it is normally associated in its naturally occurring state. In some instances, a population of substantially purified cells refers to a homogenous population of cells. In other instances, this term refers simply to cell that have been separated from the cells with which they are naturally associated in their natural state. In some aspects, the cells are cultured in vitro. In other aspects, the cells are not cultured in vitro.

[0554] The term “therapeutic” as used herein means a treatment. A therapeutic effect is obtained by reduction, suppression, remission, or eradication of a disease state.

[0555] The term “prophylaxis” as used herein means the prevention of or protective treatment for a disease or disease state.

[0556] In the context of the present invention, “tumor antigen” or “hyperproliferative disorder antigen” or “antigen associated with a hyperproliferative disorder” refers to antigens that are common to specific hyperproliferative disorders. In certain aspects, the hyperproliferative disorder antigens of the present invention are derived from, cancers including but not limited to primary or metastatic melanoma, thymoma, lymphoma, sarcoma, lung cancer, liver cancer, non-Hodgkin lymphoma, Hodgkin lymphoma, leukemias, uterine cancer, cervical cancer, bladder cancer, kidney cancer and adenocarcinomas such as breast cancer, prostate cancer, ovarian cancer, pancreatic cancer, and the like.

[0557] The term “transfected” or “transformed” or “transduced” refers to a process by which exogenous nucleic acid is transferred or introduced into the host cell. A “transfected” or “transformed” or “transduced” cell is one which has been transfected, transformed or transduced with exogenous nucleic acid. The cell includes the primary subject cell and its progeny.

[0558] The term “specifically binds,” refers to a molecule recognizing and binding with a binding partner (e.g., a protein or nucleic acid) present in a sample, but which molecule does not substantially recognize or bind other molecules in the sample.

[0559] “Membrane anchor” or “membrane tethering domain”, as that term is used herein, refers to a polypeptide or moiety, e.g., a myristoyl group, sufficient to anchor an extracellular or intracellular domain to the plasma membrane.

[0560] The term “bioequivalent” refers to an amount of an agent other than the reference compound (e.g., RAD001), required to produce an effect equivalent to the effect produced by the reference dose or reference amount of the reference compound (e.g., RAD001). In an embodiment the effect is the level of mTOR inhibition, e.g., as measured by P70 S6 kinase inhibition, e.g., as evaluated in an in vivo or in vitro assay, e.g., as measured by an assay described herein, e.g., the Boulay assay. In an embodiment, the effect is alteration of the ratio of PD-1 positive/PD-1 negative T cells, as measured by cell sorting. In an embodiment a bioequivalent amount or dose of an mTOR inhibitor is the amount or dose that achieves the same level of P70 S6 kinase inhibition as does the reference dose or reference amount of a reference compound. In an embodiment, a bioequivalent amount or dose of an mTOR inhibitor is the amount or dose that achieves the same level of alteration in the ratio of PD-1 positive/PD-1 negative T cells as does the reference dose or reference amount of a reference compound.

[0561] The term “low, immune enhancing, dose” when used in conjunction with an mTOR inhibitor, e.g., an allosteric mTOR inhibitor, e.g., RAD001 or rapamycin, or a catalytic mTOR inhibitor, refers to a dose of mTOR inhibitor that partially, but not fully, inhibits mTOR activity, e.g., as measured by the inhibition of P70 S6 kinase activity. Methods for evaluating mTOR activity, e.g., by inhibition of P70 S6 kinase, are discussed herein. The dose is insufficient to result in complete immune suppression but is sufficient to enhance the immune response. In an embodiment, the low, immune enhancing, dose of mTOR inhibitor results in a decrease in the number of PD-1 positive T cells and/or an increase in the number of PD-1 negative T cells, or an increase in the ratio of PD-1 negative T cells/PD-1 positive T cells. In an embodiment, the low, immune enhancing, dose of mTOR inhibitor results in an increase in the number of naive T cells. In an embodiment, the low, immune enhancing, dose of mTOR inhibitor results in one or more of the following:
[0562] an increase in the expression of one or more of the following markers: CD62Lhigh, CD127 high, CD27+, and BCL2, e.g., on memory T cells, e.g., memory T cell precursors;
[0563] a decrease in the expression of KLRG1, e.g., on memory T cells, e.g., memory T cell precursors; and
[0564] an increase in the number of memory T cell precursors, e.g., cells with any one or combination of the following characteristics: increased CD62Lhigh, increased CD127 high, increased CD27+, decreased KLRG1, and increased BCL2;
[0565] wherein any of the changes described above occurs, e.g., at least transiently, e.g., as compared to a non-treated subject.

[0566] “Refractory” as used herein refers to a disease, e.g., cancer, that does not respond to a treatment. In embodiments, a refractory cancer can be resistant to a treatment before or at the beginning of the treatment. In other embodiments, the refractory cancer can become resistant during a treatment. A refractory cancer is also called a resistant cancer.

[0567] “Relapsed” as used herein refers to the return of a disease (e.g., cancer) or the signs and symptoms of a disease such as cancer after a period of improvement, e.g., after prior treatment of a therapy, e.g., cancer therapy.

[0568] Ranges: throughout this disclosure, various aspects of the invention can be presented in a range format. It should be understood that the description in range format is merely for convenience and brevity and should not be construed as an inflexible limitation on the scope of the invention. Accordingly, the description of a range should be considered to have specifically disclosed all the possible subranges as well as individual numerical values within that range. For example, description of a range such as from 1 to 6 should be considered to have specifically disclosed subranges such as from 1 to 3, from 1 to 4, from 1 to 5, from 2 to 4, from 2 to 6, from 3 to 6 etc., as well as individual numbers within that range, for example, 1, 2, 2.7, 3, 4, 5, 5.3, and 6. As another example, a range such as 95-99% identity, includes something with 95%, 96%, 97%, 98% or 99% identity, and includes subranges such as 96-99%, 96-98%, 96-97%, 97-99%, 97-98% and 98-99% identity. This applies regardless of the breadth of the range.

[0569] The gRNA molecules, compositions and methods described herein relate to genome editing in eukaryotic cells using a CRISPR/Cas system, e.g., a Cas9 system. In particular, the gRNA molecules, compositions and methods described herein relate to regulation of expression of (or expression of functional versions of) target molecules that have an effect on the function of a transplanted cell, for example a cell for cancer immunotherapy. In an aspect, the transplanted cell is an immune effector cell, e.g., an NK cell or T cell. In an aspect, the cell is an allogeneic cell. In an aspect, the cell has been, is or will be engineered to express a chimeric antigen receptor. Thus, provided herein are compositions and methods for altering, e.g., inhibiting or reducing, the expression and/or function (e.g., the level of expression of a functional version) of a gene product which may improve the efficacy (for example, by reducing or eliminating undesirable immunogenicity (such as a host versus graft response or a graft versus host response)), function, proliferation, stimulation or survival of a transplanted cell, for example a transplanted immune effector cell, for example a NK cell or T cell, for example a T cell engineered to express a chimeric antigen receptor (CAR), for example an allogeneic CAR-expressing T cell for immunotherapy.

[0570] In aspects, the gene products are allogeneic T cell targets such as a component of the T cell receptor, e.g., CD3zeta, CD3 epsilon, CD3 gamma, CD3 delta, T cell receptor (TCR) alpha or TCR beta; an HLA molecule or beta-2 microglobulin (B2M), e.g., an HLA-A, an HLA-B, an HLA-C or B2M; a CIITA molecule; or a target for an immunosuppressant, e.g., glucocorticoid receptor, deoxycytidine kinase, an FKBP, CD52 or a cyclophilin family member; and combinations thereof. Without being bound by theory it is believed that inhibition or elimination of the level of an allogeneic T cell target or level of expression of an allogeneic T cell target gene product (e.g., via alteration of the gene) may improve the function of a cell, e.g., a transplanted cell, e.g., a transplanted immune effector cell, e.g., a CART cell, e.g., an allogeneic CART cell, by reducing or eliminating a graft vs. host response, a host vs. graft response, or will render said transplanted cell resistant to immunosuppressant therapy.

[0571] In an aspect, compositions and methods described herein can be used to improve cell, e.g., T cell, e.g., CAR-engineered T cell, e.g., allogeneic CAR-engineered T cell function (for example, by reducing or eliminating undesirable immunogenicity (such as a host versus graft response or a graft versus host response)), survival, proliferation and/or efficacy by altering the gene of a component of the T cell receptor (TCR), e.g., CD3zeta, CD3 epsilon, CD3 gamma, CD3 delta, T cell receptor (TCR) alpha, e.g., constant region of TCR alpha, or TCR beta, e.g., constant region 1 or constant region 2 of TCR beta gene. While not wishing to be bound by theory, it is considered that reduced or absent expression of functional T-cell receptor components reduces or eliminates the presence of TCR on the surface of said cell, thereby reducing or preventing graft vs. host disease by eliminating T cell receptor recognition of and response to host tissues. This approach, therefore, could be used to generate “off the shelf” T cells (Torikai et al., 2012 Blood 119, 5697-5705).

[0572] In an aspect, compositions and methods described herein can be used to improve cell, e.g., T cell, e.g., CAR-engineered T cell, e.g., allogeneic CAR-engineered T cell function (for example, by reducing or eliminating undesirable immunogenicity (such as a host versus graft response or a graft versus host response)), survival, proliferation and/or efficacy by altering the gene of a component of the major histocompatibility complex, e.g., an HLA protein or B2M, e.g., HLA-A, HLA-B, HLA-C or B2M (encoded by the B2M gene), or protein which regulates expression of one or more components of the major histocompatibility complex, e.g., NLRC5. While not wishing to be bound by theory, it is considered that reduced or absent expression of a mismatch (e.g., one that does not match the type of the subject receiving the cell therapy) HLA protein (or component) reduces or eliminate host vs. graft disease by eliminating host T cell receptor recognition of and response to mismatched (e.g., allogeneic) graft tissue. This approach, therefore, could be used to generate “off the shelf” T cells.

[0573] In an aspect, compositions and methods described herein can be used to improve cell, e.g., T cell, e.g., CAR-engineered T cell, e.g., allogeneic CAR-engineered T cell function (for example, by reducing or eliminating undesirable immunogenicity (such as a host versus graft response or a graft versus host response)), survival, proliferation and/or efficacy by altering a gene of a component of the major histocompatibility complex class II or a regulator of MHC class II expression, e.g., CIITA (encoded by the CIITA gene), RFXANK, RFX5, or RFXAP, and combinations thereof, e.g., CIITA. While not wishing to be bound by theory, it is believed that reducing or eliminating the expression of a regulator of MHC class II expression, e.g., CIITA, will reduce or eliminate the expression of MHC class II molecules on the allogeneic cell, thereby reducing or eliminating expression of a mismatch (e.g., one that does not match the type of the subject receiving the cell therapy) MHC class II protein (or component), thereby reducing or eliminating host vs. graft disease by, e.g., eliminating host T cell receptor recognition of and response to mismatched (e.g., allogeneic) graft tissue, e.g., allogeneic T cell, e.g., allogeneic CART cell, as described herein. This approach, therefore, could be used to generate “off the shelf” T cells.

[0574] In an aspect, it may be beneficial to reduce or eliminate expression of both one or more MHC class I molecules and one or more MHC II molecules, e.g., in a T cell, e.g., in an allogeneic T cell, e.g., in an allogeneic CART cell, e.g., as described herein, to further reduce or eliminate the host versus graft disease response upon administration of the cell. Thus, in embodiments of the cells and methods of the invention, cells may be contacted with a composition of the invention (e.g., a composition comprising a gRNA and a Cas9 molecule) comprising a gRNA molecule, e.g., as described herein, to B2M (e.g., such that expression of one or more MHC class I molecules is reduced or eliminated in said cell) and a composition of the invention (e.g., a composition comprising a gRNA and a Cas9 molecule) comprising a gRNA molecule, e.g., as described herein, to CIITA (e.g., such that expression of one or more MHC class II molecules is reduced or eliminated). In embodiments of the cells and methods of the invention, the cell may also be contacted with a composition of the invention (e.g., a composition comprising a gRNA and a Cas9 molecule) comprising a gRNA molecule, e.g., as described herein, to a component of the TCR, e.g., to TRAC and/or TRBC (e.g., such that expression of the T cell receptor, e.g., one or more components of the TCR is reduced or eliminated). In an embodiment, a cell of the invention has reduced or eliminated expression of TCR (e.g., as detected by flow cytometry), reduced or eliminated expression of one or more MHC class I molecules (e.g., as detected by flow cytometry), and reduced or eliminated expression of one or more MHC class II molecules (e.g., as detected by flow cytometry). In an embodiment, a cell of the invention has reduced or eliminated expression of TRAC, reduced or eliminated expression of B2M, and reduced or eliminated expression of CIITA. In an embodiment, a cell of the invention has reduced or eliminated expression of TRAC, reduced or eliminated expression of NLRC5, and reduced or eliminated expression of CIITA. In embodiments, the reduced or eliminated expression is measured relative to a similar cell that has not been treated with a composition or CRISPR system of the invention. In embodiments, the cell is an immune effector cell, e.g., a T cell or NK cell, e.g., a T cell, e.g., as described herein. In embodiments the cell is a T cell which is engineered to express a chimeric antigen receptor (CAR), e.g., as described herein. In embodiments, the CAR is a BCMA CAR, e.g., as described herein. In an embodiment, the invention provides a cell, e.g., an immune effector cell, e.g., a T cell or NK cell, e.g., a T cell, engineered to express a BCMA CAR which is TCR−/B2M−/CIITA− or TCR−/NLRC5−/CIITA−. In embodiments, the cell is a human cell. In embodiments, the cell is allogeneic relative to a subject to be administered said cell. In embodiments, the reduced or eliminated expression of TCR, B2M, NLRC5 and/or CIITA is accomplished by introducing into said cell a composition, CRISPR system, or gRNA of the invention, e.g., as described herein, or by a method as described herein.

[0575] In an aspect, compositions and methods described herein can be used to improve cell, e.g., T cell, e.g., CAR-engineered T cell, e.g., allogeneic CAR-engineered T cell function (for example, by reducing or eliminating undesirable immunogenicity (such as a host versus graft response or a graft versus host response)), survival, proliferation and/or efficacy by altering the gene of a target for an immunosuppressant, e.g., glucocorticoid receptor (GR) (encoded by NR3C1). Without being bound by theory, it is considered that absent or reduced expression of functional GR on a cell therapy product allows that cell therapy product to function in the presence of an immunosuppressive such as a corticosteroid such as dexamethasone, said immunosuppressive being administered to, for example, reduce or eliminate host vs. graft disease. This approach, therefore, could be used to generate “off the shelf” T cells.

[0576] In an aspect, compositions and methods described herein can be used to improve cell, e.g., T cell, e.g., CAR-engineered T cell, e.g., allogeneic CAR-engineered T cell function (for example, by reducing or eliminating undesirable immunogenicity (such as a host versus graft response or a graft versus host response)), survival, proliferation and/or efficacy by altering the gene of a target for an immunosuppressant, e.g., CD52 (encoded by CD52). Without being bound by theory, it is considered that absent or reduced expression of functional CD52 on a cell therapy product allows that cell therapy product to function in the presence of an immunosuppressive such as an anti-CD52 antibody or antigen-binding fragment thereof such as alemtuzumab (CAMPATH®), said immunosuppressive being administered to, for example, reduce or eliminate host vs. graft disease. This approach, therefore, could be used to generate “off the shelf” T cells.

[0577] In an aspect, compositions and methods described herein can be used to improve cell, e.g., T cell, e.g., CAR-engineered T cell, e.g., allogeneic CAR-engineered T cell function (for example, by reducing or eliminating undesirable immunogenicity (such as a host versus graft response or a graft versus host response)), survival, proliferation and/or efficacy by altering the gene of a target for an immunosuppressant, e.g., an FKBP family member, e.g., FKBP12 (encoded by FKBP1A). Without being bound by theory, it is considered that absent or reduced expression of functional FKBP12 on a cell therapy product allows that cell therapy product to function in the presence of an immunosuppressive such as FK506 (or FKBP12-binding fragment or analog thereof), cyclosporine, rapamycin or rapalog, or mTor inhibitor such as RAD001, said immunosuppressive being administered to, for example, reduce or eliminate host vs. graft disease. This approach, therefore, could be used to generate “off the shelf” T cells.

[0578] In an aspect, compositions and methods described herein can be used to improve cell, e.g., T cell, e.g., CAR-engineered T cell, e.g., allogeneic CAR-engineered T cell function (for example, by reducing or eliminating undesirable immunogenicity (such as a host versus graft response or a graft versus host response)), survival, proliferation and/or efficacy by altering the gene of a target for an immunosuppressant, e.g., deoxycytidine kinase (encoded by DCK). Without being bound by theory, it is considered that absent or reduced expression of functional deoxycytidine kinase on a cell therapy product allows that cell therapy product to function in the presence of an immunosuppressive a nucleoside analog-based drug such as cytarabine (cytosine arabinoside) or gemcitabine], said immunosuppressive being administered to, for example, reduce or eliminate host vs. graft disease or treat a cancer. This approach, therefore, could be used to generate “off the shelf” T cells.

[0579] In aspects, the gene products are inhibitory molecules, e.g., immune checkpoint proteins, e.g., PD-1, PD-L1, PD-L2, CTLA4, TIM3, LAG3, CEACAM (e.g., CEACAM-1, CEACAM-3 and/or CEACAM-5), VISTA, BTLA, TIGIT, LAIR1, CD160, 2B4, CD80, CD86, B7-H3 (CD276), B7-H4 (VTCN1), HVEM (TNFRSF14 or CD107), KIR, A2aR, MHC class I, MHC class II, GAL9, adenosine, and TGF beta. Without being bound by theory, it is believed that inhibition or elimination of the level of an inhibitory molecule or level of expression of inhibitory molecule gene product (e.g., via alteration of the gene) may improve the function of a cell, e.g., a transplanted cell, e.g., a transplanted immune effector cell, e.g., a CART cell, e.g., an allogeneic CART cell, by reducing or eliminating the inhibitory effects mediated by said inhibitory molecule.

[0580] In one aspect, the compositions and methods described herein can be used to decrease the effect of immune suppressive factors on cells, e.g., CAR engineered T cells, by altering the gene of an inhibitory molecule, e.g., PD1. While not wishing to be bound by theory, it is considered that reduced or absent expression of Programed Cell Death 1 (PD-1) (encoded by PDCD1) abrogates the induction of a suppressed or non-responsive state (“anergy”).

[0581] In one aspect, the compositions and methods described herein can be used to decrease the effect of immune suppressive factors on cells, e.g., CAR engineered T cells, by altering the gene of an inhibitory molecule, e.g., Tim3. While not wishing to be bound by theory, it is considered that reduced or absent expression of Tim3 (encoded by HAVCR2) abrogates the induction of a suppressed or non-responsive state (“anergy”).

[0582] In one aspect, the compositions and methods described herein can be used to decrease the effect of immune suppressive factors on cells, e.g., CAR engineered T cells, by altering the gene of an inhibitory molecule, e.g., CTLA4 gene. While not wishing to be bound by theory, it is considered that reduced or absent expression of cytotoxic T-lymphocyte associated antigen 4 (encoded by CTLA4) abrogates the induction of a suppressed or non-responsive state (“anergy”).

[0583] In one aspect, the compositions and methods described herein can be used to decrease the effect of immune suppressive factors on cells, e.g., CAR engineered T cells, by altering the gene of an inhibitory molecule, e.g., Lag3 gene. While not wishing to be bound by theory, it is considered that reduced or absent expression of Lymphocyte-activation gene 3 (Lag3) (encoded by LAG3) abrogates the induction of a suppressed or non-responsive state (“anergy”).

[0584] In one aspect, the compositions and methods described herein can be used to decrease the effect of immune suppressive factors on cells, e.g., CAR engineered T cells, by altering the gene of an inhibitory molecule, e.g., PD-L1 gene. While not wishing to be bound by theory, it is considered that reduced or absent expression of Programmed Death Ligand 1 (PD-L1, also known as CD274 and B7-H1) (encoded by CD274) abrogates the induction of a suppressed or non-responsive state (“anergy”).

[0585] In one aspect, the compositions and methods described herein can be used to decrease the effect of immune suppressive factors on cells, e.g., CAR engineered T cells, by altering the gene of a downstream effector molecule of an inhibitory molecule, e.g., Tyrosine-protein phosphatase non-receptor type 1 gene. While not wishing to be bound by theory, it is considered that reduced or absent expression of functional tyrosine-protein phosphatase non-receptor type 1, also known as protein-tyrosine phosphatase 1B, (encoded by PTPN1) abrogates the induction of a suppressed or non-responsive state (“anergy”) by affecting signaling through an inhibitory molecule.

[0586] In aspects, the compositions and methods described herein may be used in combination to generate cells, e.g., transplanted cells, e.g., allogeneic cells, e.g., immune effector cells, e.g., NK cells or T cells, e.g., CAR-engineered T cells with enhanced efficacy (for example, by reducing or eliminating undesirable immunogenicity (such as a host versus graft response or a graft versus host response)), survival, proliferation and/or stimulation relative to unmodified cells.

[0587] In one approach, the compositions and methods described herein may be used to generate cells in which levels or expression levels of a functional component of TCR have been reduced or eliminated and in which levels or expression levels of a functional MHC have been reduced or eliminated. In one embodiment, cells have reduced or eliminated levels or expression levels of TCR alpha and HLA-A. In one embodiment, cells have reduced or eliminated levels or expression levels of TCR alpha and HLA-B. In one embodiment, cells have reduced or eliminated levels or expression levels of TCR alpha and HLA-C. In one embodiment, cells have reduced or eliminated levels or expression levels of TCR alpha and B2M. In one embodiment, cells have reduced or eliminated levels or expression levels of TCR alpha and NLRC5. In one embodiment, cells have reduced or eliminated levels or expression levels of TCR beta and HLA-A. In one embodiment, cells have reduced or eliminated levels or expression levels of TCR beta and HLA-B. In one embodiment, cells have reduced or eliminated levels or expression levels of TCR beta and HLA-C. In one embodiment, cells have reduced or eliminated levels or expression levels of TCR beta and B2M. In one embodiment, cells have reduced or eliminated levels or expression levels of TCR beta and NLRC5. In one embodiment, cells have reduced or eliminated levels or expression levels of CD3zeta and HLA-A. In one embodiment, cells have reduced or eliminated levels or expression levels of CD3zeta and HLA-B. In one embodiment, cells have reduced or eliminated levels or expression levels of CD3zeta and HLA-C. In one embodiment, cells have reduced or eliminated levels or expression levels of CD3zeta and B2M. In one embodiment, cells have reduced or eliminated levels or expression levels of CD3zeta and NLRC5. In one embodiment, cells have reduced or eliminated levels or expression levels of CD3epsilon and HLA-A. In one embodiment, cells have reduced or eliminated levels or expression levels of CD3epsilon and HLA-B. In one embodiment, cells have reduced or eliminated levels or expression levels of CD3epsilon and HLA-C. In one embodiment, cells have reduced or eliminated levels or expression levels of CD3epsilon and B2M. In one embodiment, cells have reduced or eliminated levels or expression levels of CD3epsilon and NLRC5. In one embodiment, cells have reduced or eliminated levels or expression levels of CD3gamma and HLA-A. In one embodiment, cells have reduced or eliminated levels or expression levels of CD3gamma and HLA-B. In one embodiment, cells have reduced or eliminated levels or expression levels of CD3gamma and HLA-C. In one embodiment, cells have reduced or eliminated levels or expression levels of CD3gamma and B2M. In one embodiment, cells have reduced or eliminated levels or expression levels of CD3gamma and NLRC5. In one embodiment, cells have reduced or eliminated levels or expression levels of CD3delta and HLA-A. In one embodiment, cells have reduced or eliminated levels or expression levels of CD3delta and HLA-B. In one embodiment, cells have reduced or eliminated levels or expression levels of CD3delta and HLA-C. In one embodiment, cells have reduced or eliminated levels or expression levels of CD3delta and B2M. In one embodiment, cells have reduced or eliminated levels or expression levels of CD3delta and NLRC5. In any of the aforementioned embodiments, the cells may have reduced or eliminated levels or expression levels of CIITA. In an embodiment, the cells have reduced or eliminated levels or expression levels of TRAC, B2M and CIITA. In an embodiment, the cells have reduced or eliminated levels or expression levels of TRBC, B2M and CIITA. In an embodiment, the cells have reduced or eliminated levels or expression levels of TRAC, TRBC, B2M and CIITA. In an embodiment, the cells have reduced or eliminated levels or expression levels of TRAC, NLRC5 and CIITA. In an embodiment, the cells have reduced or eliminated levels or expression levels of TRBC, NLRC5 and CIITA. In an embodiment, the cells have reduced or eliminated levels or expression levels of TRAC, TRBC, NLRC5 and CIITA. In any of the aforementioned embodiments, the cells may additionally have reduced or eliminated levels or expression levels of one or more inhibitory molecules or downstream effectors of an inhibitory molecule. In one aspect, the one or more inhibitory molecules comprises PD-1. In one aspect, the one or more inhibitory molecules comprises PD-L1. In one aspect, the one or more inhibitory molecules comprises Lag3. In one aspect, the one or more inhibitory molecules comprises Tim3. In one aspect, the one or more inhibitory molecules comprises CTLA4. In one aspect, the one or more inhibitory molecules comprises PTPN1. In one aspect, the one or more inhibitory molecules comprises PD-1 and PD-L1. In one aspect, the one or more inhibitory molecules comprises PD-1 and Lag3. In one aspect, the one or more inhibitory molecules comprises PD-1 and Tim3. In one aspect, the one or more inhibitory molecules comprises PD-1 and CTLA4. In one aspect, the one or more inhibitory molecules comprises PD-L1 and Lag3. In one aspect, the one or more inhibitory molecules comprises PD-L1 and Tim3. In one aspect, the one or more inhibitory molecules comprises PD-L1 and CTLA4. In one aspect, the one or more inhibitory molecules comprises Tim3 and Lag3. In one aspect, the one or more inhibitory molecules comprises Tim3 and CTLA4. In one aspect, the one or more inhibitory molecules comprises Lag3 and CTLA4. In one aspect, the one or more inhibitory molecules comprises, PD-1, PD-L1 and Lag3. In one aspect, the one or more inhibitory molecules comprises, PD-1, PD-L1 and Tim3. In one aspect, the one or more inhibitory molecules comprises, PD-1, PD-L1 and CTLA-4. In one aspect, the one or more inhibitory molecules comprises, PD-1, Tim3 and Lag3. In one aspect, the one or more inhibitory molecules comprises, PD-L1, Tim3 and Lag3. In one aspect, the one or more inhibitory molecules comprises, CTLA4, Tim3 and Lag3.

[0588] In one aspect, the compositions and methods described herein may be used to generate cells, e.g., T cells, e.g., CAR-engineered T cells, in which levels or expression levels of two or more, e.g., 2, e.g., 3, e.g., 4, inhibitory molecules have been reduced or eliminated. In one aspect, the two or more, e.g., 2, e.g., 3, e.g., 4, inhibitory molecules comprises PD-1 and PD-L1. In one aspect, the two or more, e.g., 2, e.g., 3, e.g., 4, inhibitory molecules comprises PD-1 and Lag3. In one aspect, the two or more, e.g., 2, e.g., 3, e.g., 4, inhibitory molecules comprises PD-1 and Tim3. In one aspect, the two or more, e.g., 2, e.g., 3, e.g., 4, inhibitory molecules comprises PD-1 and CTLA4. In one aspect, the two or more, e.g., 2, e.g., 3, e.g., 4, inhibitory molecules comprises PD-L1 and Lag3. In one aspect, the two or more, e.g., 2, e.g., 3, e.g., 4, inhibitory molecules comprises PD-L1 and Tim3. In one aspect, the two or more, e.g., 2, e.g., 3, e.g., 4, inhibitory molecules comprises PD-L1 and CTLA4. In one aspect, the two or more, e.g., 2, e.g., 3, e.g., 4, inhibitory molecules comprises Tim3 and Lag3. In one aspect, the two or more, e.g., 2, e.g., 3, e.g., 4, inhibitory molecules comprises Tim3 and CTLA4. In one aspect, the two or more, e.g., 2, e.g., 3, e.g., 4, inhibitory molecules comprises Lag3 and CTLA4. In one aspect, the two or more, e.g., 2, e.g., 3, e.g., 4, inhibitory molecules comprises, PD-1, PD-L1 and Lag3. In one aspect, the two or more, e.g., 2, e.g., 3, e.g., 4, inhibitory molecules comprises, PD-1, PD-L1 and Tim3. In one aspect, the two or more, e.g., 2, e.g., 3, e.g., 4, inhibitory molecules comprises, PD-1, PD-L1 and CTLA-4. In one aspect, the two or more, e.g., 2, e.g., 3, e.g., 4, inhibitory molecules comprises, PD-1, Tim3 and Lag3. In one aspect, the two or more, e.g., 2, e.g., 3, e.g., 4, inhibitory molecules comprises, PD-L1, Tim3 and Lag3. In one aspect, the two or more, e.g., 2, e.g., 3, e.g., 4, inhibitory molecules comprises, CTLA4, Tim3 and Lag3.

[0589] In embodiments in which the cells have reduced or eliminated levels or expression levels of TCR alpha, the cells preferably comprise, or at one time comprised, a gRNA molecule comprising a targeting domain comprising SEQ ID NO: SEQ ID NO: 5816 to SEQ ID NO: 5965 or SEQ ID NO: 5528 to SEQ ID NO: 5623, for example, SEQ ID NO: 5569, SEQ ID NO: 5587, SEQ ID NO: 5592 or SEQ ID NO: 5586, or a gRNA molecule comprising a targeting domain consisting of 17, 18, 19, 20, 21, 22, 23, 24 or 25 consecutive nucleotides, preferably 20 consecutive nucleotides, of SEQ ID NO: SEQ ID NO: 5816 to SEQ ID NO: 5965 or SEQ ID NO: 5528 to SEQ ID NO: 5623.

[0590] In embodiments in which the cells have reduced or eliminated levels or expression levels of TCR beta, the cells preferably comprise, or at one time comprised, a gRNA molecule comprising a targeting domain comprising SEQ ID NO: 5966 to SEQ ID NO: 6097 or SEQ ID NO: 5624 to SEQ ID NO: 5643, or a gRNA molecule comprising a targeting domain consisting of 17, 18, 19, 20, 21, 22, 23, 24 or 25 consecutive nucleotides, preferably 20 consecutive nucleotides, of SEQ ID NO: 5966 to SEQ ID NO: 6097 or SEQ ID NO: 5624 to SEQ ID NO: 5643. In embodiments in which the cells have reduced or eliminated levels or expression levels of TCR beta, the cells preferably comprise, or at one time comprised, a gRNA molecule comprising a targeting domain comprising SEQ ID NO: 6098 to SEQ ID NO: 6226 or SEQ ID NO: 5644 to SEQ ID NO: 5719, or a gRNA molecule comprising a targeting domain consisting of 17, 18, 19, 20, 21, 22, 23, 24 or 25 consecutive nucleotides, preferably 20 consecutive nucleotides, of SEQ ID NO: 6098 to SEQ ID NO: 6226 or SEQ ID NO: 5644 to SEQ ID NO: 5719.

[0591] In embodiments in which the cells have reduced or eliminated levels or expression levels of CD3zeta (encoded by CD247 gene), the cells preferably comprise, or at one time comprised, a gRNA molecule comprising a targeting domain comprising SEQ ID NO: 84 to SEQ ID NO: 392, or a gRNA molecule comprising a targeting domain consisting of 17, 18, 19, 20, 21, 22, 23, 24 or 25 consecutive nucleotides, preferably 20 consecutive nucleotides, of SEQ ID NO: 84 to SEQ ID NO: 392.

[0592] In embodiments in which the cells have reduced or eliminated levels or expression levels of CD3epsilon (encoded by CD3 E gene), the cells preferably comprise, or at one time comprised, a gRNA molecule comprising a targeting domain comprising SEQ ID NO: 533 to SEQ ID NO: 839, or a gRNA molecule comprising a targeting domain consisting of 17, 18, 19, 20, 21, 22, 23, 24 or 25 consecutive nucleotides, preferably 20 consecutive nucleotides, of SEQ ID NO: 533 to SEQ ID NO: 839.

[0593] In embodiments in which the cells have reduced or eliminated levels or expression levels of CD3delta (encoded by CD3D gene), the cells preferably comprise, or at one time comprised, a gRNA molecule comprising a targeting domain comprising SEQ ID NO: 393 to SEQ ID NO: 532, or a gRNA molecule comprising a targeting domain consisting of 17, 18, 19, 20, 21, 22, 23, 24 or 25 consecutive nucleotides, preferably 20 consecutive nucleotides, of SEQ ID NO: 393 to SEQ ID NO: 532.

[0594] In embodiments in which the cells have reduced or eliminated levels or expression levels of CD3gamma (encoded by CD3G gene), the cells preferably comprise, or at one time comprised, a gRNA molecule comprising a targeting domain comprising SEQ ID NO: 840 to SEQ ID NO: 968, or a gRNA molecule comprising a targeting domain consisting of 17, 18, 19, 20, 21, 22, 23, 24 or 25 consecutive nucleotides, preferably 20 consecutive nucleotides, of SEQ ID NO: 840 to SEQ ID NO: 968.

[0595] In embodiments in which the cells have reduced or eliminated levels or expression levels of B2M (encoded by B2M gene), the cells preferably comprise, or at one time comprised, a gRNA molecule comprising a targeting domain comprising SEQ ID NO: 1 to SEQ ID NO: 83 or SEQ ID NO: 5492 to SEQ ID NO: 5527, or a gRNA molecule comprising a targeting domain consisting of 17, 18, 19, 20, 21, 22, 23, 24 or 25 consecutive nucleotides, preferably 20 consecutive nucleotides, of SEQ ID NO: 1 to SEQ ID NO: 83 or SEQ ID NO: 5492 to SEQ ID NO: 5527.

[0596] In embodiments in which the cells have reduced or eliminated levels or expression levels of NLRC5 (encoded by NLRC5 gene), the cells preferably comprise, or at one time comprised, a gRNA molecule comprising a targeting domain comprising SEQ ID NO: 8622 to SEQ ID NO: 10089, or a gRNA molecule comprising a targeting domain consisting of 17, 18, 19, or 20 consecutive nucleotides, preferably 20 consecutive nucleotides, of SEQ ID NO: 8622 to SEQ ID NO: 10089.

[0597] In embodiments in which the cells have reduced or eliminated levels or expression levels of HLA-A (encoded by HLA-A gene), the cells preferably comprise, or at one time comprised, a gRNA molecule comprising a targeting domain comprising SEQ ID NO: 969 to SEQ ID NO: 1345, or a gRNA molecule comprising a targeting domain consisting of 17, 18, 19, 20, 21, 22, 23, 24 or 25 consecutive nucleotides, preferably 20 consecutive nucleotides, of SEQ ID NO: 969 to SEQ ID NO: 1345.

[0598] In embodiments in which the cells have reduced or eliminated levels or expression levels of HLA-B (encoded by HLA-B gene), the cells preferably comprise, or at one time comprised, a gRNA molecule comprising a targeting domain comprising SEQ ID NO: 1346 to SEQ ID NO: 1698, or a gRNA molecule comprising a targeting domain consisting of 17, 18, 19, 20, 21, 22, 23, 24 or 25 consecutive nucleotides, preferably 20 consecutive nucleotides, of SEQ ID NO: 1346 to SEQ ID NO: 1698.

[0599] In embodiments in which the cells have reduced or eliminated levels or expression levels of HLA-C (encoded by HLA-C gene), the cells preferably comprise, or at one time comprised, a gRNA molecule comprising a targeting domain comprising SEQ ID NO: 1699 to SEQ ID NO: 2068, or a gRNA molecule comprising a targeting domain consisting of 17, 18, 19, 20, 21, 22, 23, 24 or 25 consecutive nucleotides, preferably 20 consecutive nucleotides, of SEQ ID NO: 1699 to SEQ ID NO: 2068.

[0600] In embodiments in which the cells have reduced or eliminated levels or expression levels of CIITA (encoded by CTIIA gene), the cells preferably comprise, or at one time comprised, a gRNA molecule comprising a targeting domain comprising any one of SEQ ID NO: 6750 to SEQ ID NO: 7716, or a gRNA molecule comprising a targeting domain consisting of 17, 18, 19, 20, 21, 22, 23, 24 or 25 consecutive nucleotides, preferably 20 consecutive nucleotides, of SEQ ID NO: 6750 to SEQ ID NO: 7716. In embodiments, the gRNA molecule comprises a targeting domain comprises any one of SEQ ID NO: 7717 to SEQ ID NO: 7804.

[0601] In embodiments in which the cells have reduced or eliminated levels or expression levels of GR (encoded by NR3C1 gene), the cells preferably comprise, or at one time comprised, a gRNA molecule comprising a targeting domain comprising SEQ ID NO: 2069 to SEQ ID NO: 2941, or a gRNA molecule comprising a targeting domain consisting of 17, 18, 19, 20, 21, 22, 23, 24 or 25 consecutive nucleotides, preferably 20 consecutive nucleotides, of SEQ ID NO: 2069 to SEQ ID NO: 2941.

[0602] In embodiments in which the cells have reduced or eliminated levels or expression levels of FKBP12 (encoded by FKBP1A gene), the cells preferably comprise, or at one time comprised, a gRNA molecule comprising a targeting domain comprising SEQ ID NO: 6325 to SEQ ID NO: 6583, or a gRNA molecule comprising a targeting domain consisting of 17, 18, 19, 20, 21, 22, 23, 24 or 25 consecutive nucleotides, preferably 20 consecutive nucleotides, of SEQ ID NO: 6325 to SEQ ID NO: 6583.

[0603] In embodiments in which the cells have reduced or eliminated levels or expression levels of CD52 (encoded by CD52 gene), the cells preferably comprise, or at one time comprised, a gRNA molecule comprising a targeting domain comprising SEQ ID NO: 6227 to SEQ ID NO: 6324, or a gRNA molecule comprising a targeting domain consisting of 17, 18, 19, 20, 21, 22, 23, 24 or 25 consecutive nucleotides, preferably 20 consecutive nucleotides, of SEQ ID NO: 6227 to SEQ ID NO: 6324.

[0604] In embodiments in which the cells have reduced or eliminated levels or expression levels of DCK (encoded by DCK gene), the cells preferably comprise, or at one time comprised, a gRNA molecule comprising a targeting domain comprising SEQ ID NO: 5278 to SEQ ID NO: 5491, or a gRNA molecule comprising a targeting domain consisting of 17, 18, 19, 20, 21, 22, 23, 24 or 25 consecutive nucleotides, preferably 20 consecutive nucleotides, of SEQ ID NO: 5278 to SEQ ID NO: 5491.

[0605] In embodiments in which the cells have reduced or eliminated levels or expression levels of PD-L1 (encoded by CD274 gene), the cells preferably comprise, or at one time comprised, a gRNA molecule comprising a targeting domain comprising SEQ ID NO: 2942 to SEQ ID NO: 3270, or a gRNA molecule comprising a targeting domain consisting of 17, 18, 19, 20, 21, 22, 23, 24 or 25 consecutive nucleotides, preferably 20 consecutive nucleotides, of SEQ ID NO: 2942 to SEQ ID NO: 3270.

[0606] In embodiments in which the cells have reduced or eliminated levels or expression levels of Tim3 (encoded by HAVCR2 gene), the cells preferably comprise, or at one time comprised, a gRNA molecule comprising a targeting domain comprising SEQ ID NO: 3271 to SEQ ID NO: 3541, or a gRNA molecule comprising a targeting domain consisting of 17, 18, 19, 20, 21, 22, 23, 24 or 25 consecutive nucleotides, preferably 20 consecutive nucleotides, of SEQ ID NO: 3271 to SEQ ID NO: 3541.

[0607] In embodiments in which the cells have reduced or eliminated levels or expression levels of Lag3 (encoded by LAG3 gene), the cells preferably comprise, or at one time comprised, a gRNA molecule comprising a targeting domain comprising SEQ ID NO: 3542 to SEQ ID NO: 4032, or a gRNA molecule comprising a targeting domain consisting of 17, 18, 19, 20, 21, 22, 23, 24 or 25 consecutive nucleotides, preferably 20 consecutive nucleotides, of SEQ ID NO: 3542 to SEQ ID NO: 4032.

[0608] In embodiments in which the cells have reduced or eliminated levels or expression levels of PD-1 (encoded by PDCD1 gene), the cells preferably comprise, or at one time comprised, a gRNA molecule comprising a targeting domain comprising SEQ ID NO: 4033 to SEQ ID NO: 4589 or SEQ ID NO: 5720 to SEQ ID NO: 5815, or a gRNA molecule comprising a targeting domain consisting of 17, 18, 19, 20, 21, 22, 23, 24 or 25 consecutive nucleotides, preferably 20 consecutive nucleotides, of SEQ ID NO: 4033 to SEQ ID NO: 4589 or SEQ ID NO: 5720 to SEQ ID NO: 5815. In one embodiment, the gRNA molecule comprises a targeting domain comprising SEQ ID NO: 5775, or comprises a targeting domain comprising or consisting of 17, 18, or 19 consecutive nucleotides of SEQ ID NO: 5775.

[0609] In embodiments in which the cells have reduced or eliminated levels or expression levels of Tyrosine-protein phosphatase non-receptor type 1 (encoded by PTPN1 gene), the cells preferably comprise, or at one time comprised, a gRNA molecule comprising a targeting domain comprising SEQ ID NO: 4590 to SEQ ID NO: 5277, or a gRNA molecule comprising a targeting domain consisting of 17, 18, 19, 20, 21, 22, 23, 24 or 25 consecutive nucleotides, preferably 20 consecutive nucleotides, of SEQ ID NO: 4590 to SEQ ID NO: 5277.

[0610] In any of the aforementioned aspects and embodiments the cell is an autologous cell. In any of the aforementioned aspects and embodiments, the cell is an allogeneic cell. In any of the aforementioned embodiments and aspects, the cell is or will be engineered to express a chimeric antigen receptor (CAR), e.g., as described herein. In any of the aforementioned aspects and embodiments, the cell is a T cell.

[0611] Additional features of the gRNA molecule, the CRISPR systems, Cas9 molecules, cells, CAR molecules, and methods of the invention are described in detail below.

I. gRNA Molecules

[0612] A gRNA molecule may have a number of domains, as described more fully below, however, a gRNA molecule typically comprises at least a crRNA domain (comprising a targeting domain) and a tracr. The gRNA molecules of the invention, used as a component of a CRISPR system, are useful for modifying (e.g., modifying the sequence) DNA at or near a target site. Such modifications include deletions and or insertions that result in, for example, reduced or eliminated expression of a functional product of the gene comprising the target site. These uses, and additional uses, are described more fully below.

[0613] In an embodiment, a unimolecular, or sgRNA comprises, preferably from 5′ to 3′: a crRNA (which contains a targeting domain complementary to a target sequence and a region that forms part of a flagpole (i.e., a crRNA flagpole region)); a loop; and a tracr (which contains a domain complementary to the crRNA flagpole region, and a domain which additionally binds a nuclease or other effector molecule, e.g., a Cas molecule, e.g., aCas9 molecule), and may take the following format (from 5′ to 3′):

[targeting domain]-[crRNA flagpole region]-[optional first flagpole extension]-[loop]-[optional first tracr extension]-[tracr flagpole region]-[tracr nuclease binding domain].

[0614] In embodiments, the tracr nuclease binding domain binds to a Cas protein, e.g., a Cas9 protein.

[0615] In an embodiment, a bimolecular, or dgRNA comprises two polynucleotides; the first, preferably from 5′ to 3′: a crRNA (which contains a targeting domain complementary to a target sequence and a region that forms part of a flagpole; and the second, preferrably from 5′ to 3′: a tracr (which contains a domain complementary to the crRNA flagpole region, and a domain which additionally binds a nuclease or other effector molecule, e.g., a Cas molecule, e.g., Cas9 molecule), and may take the following format (from 5′ to 3′):

Polynucleotide 1 (crRNA): [targeting domain]-[crRNA flagpole region]-[optional first flagpole extension]-[optional second flagpole extension]

Polynucleotide 2 (tracr): [optional first tracr extension]-[tracr flagpole region]-[tracr nuclease binding domain]

[0616] In embodiments, the tracr nuclease binding domain binds to a Cas protein, e.g., a Cas9 protein.

[0617] In some aspects, the targeting domain comprises or consists of a targeting domain sequence described herein, e.g., a targeting domain described in Table 1, 2, 3, 4, 5, 6, 6b, or 6c, or a targeting domain comprising or consisting of 17, 18, 19, 20, 21, 22, 23, 24, or 25 (preferably 20) consecutive nucleotides of a targeting domain sequence described in Table 1, 2, 3, 4, 5, 6, 6b, or 6c.

[0618] In some aspects, the flagpole, e.g., the crRNA flagpole region, comprises, from 5′ to 3′: GUUUUAGAGCUA (SEQ ID NO: 6584).

[0619] In some aspects, the flagpole, e.g., the crRNA flagpole region, comprises, from 5′ to 3′: GUUUAAGAGCUA (SEQ ID NO: 6585).

[0620] In some aspects the loop comprises, from 5′ to 3′: GAAA (SEQ ID NO: 6588).

[0621] In some aspects the tracr comprises, from 5′ to 3′: UAGCAAGUUAAAAUAAGGCUAGUCCGUUAUCAACUUGAAAAAGUGGCACCGAGUCGGUG C (SEQ ID NO: 6589) and is preferably used in a gRNA molecule comprising SEQ ID NO: 6584.

[0622] In some aspects the tracr comprises, from 5′ to 3′: UAGCAAGUUUAAAUAAGGCUAGUCCGUUAUCAACUUGAAAAAGUGGCACCGAGUCGGUG C (SEQ ID NO: 6590) and is preferably used in a gRNA molecule comprising SEQ ID NO: 6585.

[0623] In some aspects, the gRNA may also comprise, at the 3′ end, additional U nucleic acids. For example the gRNA may comprise an additional 1, 2, 3, 4, 5, 6, 7, 8, 9, or 10 U nucleic acids at the 3′ end (SEQ ID NO: 10806). In an embodiment, the gRNA comprises an additional 4 U nucleic acids at the 3′ end. In the case of dgRNA, one or more of the polynucleotides of the dgRNA (e.g., the polynucleotide comprising the targeting domain and the polynucleotide comprising the tracr) may comprise, at the 3′ end, additional U nucleic acids. For example, the case of dgRNA, one or more of the polynucleotides of the dgRNA (e.g., the polynucleotide comprising the targeting domain and the polynucleotide comprising the tracr) may comprise an additional 1, 2, 3, 4, 5, 6, 7, 8, 9, or 10 U nucleic acids at the 3′ end (SEQ ID NO: 10806). In an embodiment, in the case of dgRNA, one or more of the polynucleotides of the dgRNA (e.g., the polynucleotide comprising the targeting domain and the polynucleotide comprising the tracr) comprises an additional 4 U nucleic acids at the 3′ end. In an embodiment of a dgRNA, only the polynucleotide comprising the tracr comprises the additional U nucleic acid(s), e.g., 4 U nucleic acids. In an embodiment of a dgRNA, only the polynucleotide comprising the targeting domain comprises the additional U nucleic acid(s). In an embodiment of a dgRNA, both the polynucleotide comprising the targeting domain and the polynucleotide comprising the tracr comprise the additional U nucleic acids, e.g., 4 U nucleic acids.

[0624] In some aspects, the gRNA may also comprise, at the 3′ end, additional A nucleic acids. For example the gRNA may comprise an additional 1, 2, 3, 4, 5, 6, 7, 8, 9, or 10 A nucleic acids at the 3′ end (SEQ ID NO: 10809). In an embodiment, the gRNA comprises an additional 4 A nucleic acids at the 3′ end. In the case of dgRNA, one or more of the polynucleotides of the dgRNA (e.g., the polynucleotide comprising the targeting domain and the polynucleotide comprising the tracr) may comprise, at the 3′ end, additional A nucleic acids. For example, the case of dgRNA, one or more of the polynucleotides of the dgRNA (e.g., the polynucleotide comprising the targeting domain and the polynucleotide comprising the tracr) may comprise an additional 1, 2, 3, 4, 5, 6, 7, 8, 9, or 10 A nucleic acids at the 3′ end (SEQ ID NO: 10809). In an embodiment, in the case of dgRNA, one or more of the polynucleotides of the dgRNA (e.g., the polynucleotide comprising the targeting domain and the polynucleotide comprising the tracr) comprises an additional 4 A nucleic acids at the 3′ end. In an embodiment of a dgRNA, only the polynucleotide comprising the tracr comprises the additional A nucleic acid(s), e.g., 4 A nucleic acids. In an embodiment of a dgRNA, only the polynucleotide comprising the targeting domain comprises the additional A nucleic acid(s). In an embodiment of a dgRNA, both the polynucleotide comprising the targeting domain and the polynucleotide comprising the tracr comprise the additional U nucleic acids, e.g., 4 A nucleic acids.

[0625] In embodiments, one or more of the polynucleotides of the gRNA molecule may comprise a cap at the 5′ end.

[0626] In an embodiment, a unimolecular, or sgRNA comprises, preferably from 5′ to 3′: a crRNA (which contains a targeting domain complementary to a target sequence; a crRNA flagpole region; first flagpole extension; a loop; a first tracr extension (which contains a domain complementary to at least a portion of the first flagpole extension); and a tracr (which contains a domain complementary to the crRNA flagpole region, and a domain which additionally binds a Cas9 molecule). In some aspects, the targeting domain comprises a targeting domain sequence described herein, e.g., a targeting domain described in Table 1, 2, 3, 4, 5, 6, 6b, or 6c, or a targeting domain comprising or consisting of 17, 18, 19, 20, 21, 22, 23, 24, or 25 (preferably 20) consecutive nucleotides of a targeting domain sequence described in Table 1, 2, 3, 4, 5, 6, 6b, or 6c, for example the 3′ 17, 18, 19, 20, 21, 22, 23, 24 or 25 (preferably 20) consecutive nucleotides of a targeting domain sequence described in Table 1, 2, 3, 4, 5, 6, 6b, or 6c.

[0627] In aspects comprising a first flagpole extension and/or a first tracr extension, the flagpole, loop and tracr sequences may be as described above. In general any first flagpole extension and first tracr extension may be employed, provided that they are complementary. In embodiments, the first flagpole extension and first tracr extension consist of 3, 4, 5, 6, 7, 8, 9, 10 or more complementary nucleotides.

[0628] In some aspects, the first flagpole extension comprises, from 5′ to 3′: UGCUG (SEQ ID NO: 6586). In some aspects, the first flagpole extension consists of SEQ ID NO: 6586.

[0629] In some aspects, the first tracr extension comprises, from 5′ to 3′: CAGCA (SEQ ID NO: 6591). In some aspects, the first tracr extension consists of SEQ ID NO: 6591.

[0630] In an embodiment, a dgRNA comprises two nucleic acid molecules. In some aspects, the dgRNA comprises a first nucleic acid which contains, preferably from 5′ to 3′: a targeting domain complementary to a target sequence; a crRNA flagpole region; optionally a first flagpole extension; and, optionally, a second flagpole extension; and a second nucleic acid (which may be referred to herein as a tracr), and comprises at least a domain which binds a Cas molecule, e.g., a Cas9 molecule) comprising preferably from 5′ to 3′: optionally a first tracr extension; and a tracr (which contains a domain complementary to the crRNA flagpole region, and a domain which additionally binds a Cas, e.g., Cas9, molecule). The second nucleic acid may additionally comprise, at the 3′ end (e.g., 3′ to the tracr) additional U nucleic acids. For example the tracr may comprise an additional 1, 2, 3, 4, 5, 6, 7, 8, 9, or 10 U nucleic acids at the 3′ end (e.g., 3′ to the tracr) (SEQ ID NO: 10806). The second nucleic acid may additionally or alternately comprise, at the 3′ end (e.g., 3′ to the tracr) additional A nucleic acids. For example the tracr may comprise an additional 1, 2, 3, 4, 5, 6, 7, 8, 9, or 10 A nucleic acids at the 3′ end (e.g., 3′ to the tracr) (SEQ ID NO: 10809). In some aspects, the targeting domain comprises a targeting domain sequence described herein, e.g., a targeting domain described in Table 1, 2, 3, 4, 5, 6, 6b, or 6c, or a targeting domain comprising or consisting of 17, 18, 19, 20, 21, 22, 23, 24, or 25 (preferably 20) consecutive nucleotides of a targeting domain sequence described in Table 1, 2, 3, 4, 5, 6, 6b, or 6c.

[0631] In aspects involving a dgRNA, the crRNA flagpole region, optional first flagpole extension, optional first tracr extension and tracr sequences may be as described above.

[0632] In some aspects, the optional second flagpole extension comprises, from 5′ to 3′: UUUUG (SEQ ID NO: 6587).

[0633] In embodiments, the 3′ 1, 2, 3, 4, or 5 nucleotides, the 5′ 1, 2, 3, 4, or 5 nucleotides, or both the 3′ and 5′ 1, 2, 3, 4, or 5 nucleotides of the gRNA molecule (and in the case of a dgRNA molecule, the polynucleotide comprising the targeting domain and/or the polynucleotide comprising the tracr) are modified nucleic acids, as described more fully in section XIII, below.

[0634] The domains are discussed briefly below:

### 1) The Targeting Domain:

[0635] Guidance on the selection of targeting domains can be found, e.g., in Fu Y el al. NAT BIOTECHNOL 2014 (doi: 10.1038/nbt.2808) and Sternberg S H el al. NATURE 2014 (doi: 10.1038/naturel3011).

[0636] The targeting domain comprises a nucleotide sequence that is complementary, e.g., at least 80, 85, 90, 95, or 99% complementary, e.g., fully complementary, to the target sequence on the target nucleic acid. The targeting domain is part of an RNA molecule and will therefore comprise the base uracil (U), while any DNA encoding the gRNA molecule will comprise the base thymine (T). While not wishing to be bound by theory, it is believed that the complementarity of the targeting domain with the target sequence contributes to specificity of the interaction of the gRNA molecule/Cas9 molecule complex with a target nucleic acid. It is understood that in a targeting domain and target sequence pair, the uracil bases in the targeting domain will pair with the adenine bases in the target sequence.

[0637] In an embodiment, the targeting domain is 5 to 50, e.g., 10 to 40, e.g., 10 to 30, e.g., 15 to 30, e.g., 15 to 25 nucleotides in length. In an embodiment, the targeting domain is 15, 16, 17, 18, 19, 20, 21, 22, 23, 24 or 25 nucleotides in length. In an embodiment, the targeting domain is 16 nucleotides in length. In an embodiment, the targeting domain is 17 nucleotides in length. In an embodiment, the targeting domain is 18 nucleotides in length. In an embodiment, the targeting domain is 19 nucleotides in length. In an embodiment, the targeting domain is 20 nucleotides in length. In an embodiment, the targeting domain is 21 nucleotides in length. In an embodiment, the targeting domain is 22 nucleotides in length. In an embodiment, the targeting domain is 23 nucleotides in length. In an embodiment, the targeting domain is 24 nucleotides in length. In an embodiment, the targeting domain is 25 nucleotides in length. In embodiments, the aforementioned 16, 17, 18, 19, 20, 21, 22, 23, 24, or 25 nucleotides comprise the 5′-16, 17, 18, 19, 20, 21, 22, 23, 24, or 25 nucleotides from a targeting domain described in Table 1, 2, 3, 4, 5, 6, 6b, or 6c. In embodiments, the aforementioned 16, 17, 18, 19, 20, 21, 22, 23, 24, or 25 nucleotides comprise the 3′-16, 17, 18, 19, 20, 21, 22, 23, 24, or 25 nucleotides from a targeting domain described in Table 1, 2, 3, 4, 5, 6, 6b, or 6c.

[0638] Without being bound by theory, it is believed that the 8, 9 or 10 nucleic acids of the targeting domain disposed at the 3′ end of the targeting domain is important for targeting the target sequence, and may thus be referred to as the “core” region of the targeting domain. In an embodiment, the core domain is fully complementary with the target sequence.

[0639] The strand of the target nucleic acid with which the targeting domain is complementary is referred to herein as the target sequence. In some aspects, the target sequence is disposed on a chromosome, e.g., is a target within a gene. In some aspects the target sequence is disposed within an exon of a gene. In some aspects the target sequence is disposed within an intron of a gene. In some aspects, the target sequence comprises, or is proximal (e.g., within 10, 20, 30, 40, 50, 100, 200, 300, 400, 500, or 1000 nucleic acids) to a binding site of a regulatory element, e.g., a promoter or transcription factor binding site, of a gene of interest. Some or all of the nucleotides of the domain can have a modification, e.g., modification found in Section XIII herein.

2) crRNA Flagpole Region:

[0640] The flagpole contains portions from both the crRNA and the tracr. The crRNA flagpole region is complementary with a portion of the tracr, and in an embodiment, has sufficient complementarity to a portion of the tracr to form a duplexed region under at least some physiological conditions, for example, normal physiological conditions. In an embodiment, the crRNA flagpole region is 5 to 30 nucleotides in length. In an embodiment, the crRNA flagpole region is 5 to 25 nucleotides in length. The crRNA flagpole region can share homology with, or be derived from, a naturally occurring portion of the repeat sequence from a bacterial CRISPR array. In an embodiment, it has at least 50% homology with a crRNA flagpole region disclosed herein, e.g., an S. pyogenes, or S. thermophilus, crRNA flagpole region.

[0641] In an embodiment, the flagpole, e.g., the crRNA flagpole region, comprises SEQ ID NO: 6584. In an embodiment, the flagpole, e.g., the crRNA flagpole region, comprises sequence having at least 50%, 60%, 70%, 80%, 85%, 90%, 95% or 99% homology with SEQ ID NO: 6584. In an embodiment, the flagpole, e.g., the crRNA flagpole region, comprises at least 5, 6, 7, 8, 9, 10, or 11 nucleotides of SEQ ID NO: 6584. In an embodiment, the flagpole, e.g., the crRNA flagpole region, comprises SEQ ID NO: 6585. In an embodiment, the flagpole comprises sequence having at least 50%, 60%, 70%, 80%, 85%, 90%, 95% or 99% homology with SEQ ID NO: 6585. In an embodiment, the flagpole, e.g., the crRNA flagpole region, comprises at least 5, 6, 7, 8, 9, 10, or 11 nucleotides of SEQ ID NO: 6585.

[0642] Some or all of the nucleotides of the domain can have a modification, e.g., modification described in Section XIII herein.

### 3) First Flagpole Extension

[0643] When a tracr comprising a first tracr extension is used, the crRNA may comprise a first flagpole extension. In general any first flagpole extension and first tracr extension may be employed, provided that they are complementary. In embodiments, the first flagpole extension and first tracr extension consist of 3, 4, 5, 6, 7, 8, 9, 10 or more complementary nucleotides.

[0644] The first flagpole extension may comprise nucleotides that are complementary, e.g., 80%, 85%, 90%, 95% or 99%, e.g., fully complementary, with nucleotides of the first tracr extension. In some aspects, the first flagpole extension nucleotides that hybridize with complementary nucleotides of the first tracr extension are contiguous. In some aspects, the first flagpole extension nucleotides that hybridize with complementary nucleotides of the first tracr extension are discontinuous, e.g., comprises two or more regions of hybridization separated by nucleotides that do not base pair with nucleotides of the first tracr extension. In some aspects, the first flagpole extension comprises at least 2, 3, 4, 5, 6, 7, 8, 9, 10, 11, 12, 13, 14, 15, 16, 17, 18, 19, 20 or more nucleotides. In some aspects, the first flagpole extension comprises, from 5′ to 3′: UGCUG (SEQ ID NO: 6586). In some aspects, the first flagpole extension consists of SEQ ID NO: 6586. In some aspects the first flagpole extension comprises nucleic acid that is at least 80%, 85%, 90%, 95% or 99% homology to SEQ ID NO: 6586.

[0645] Some or all of the nucleotides of the first tracr extension can have a modification, e.g., modification found in Section XIII herein.

### 3) The Loop

[0646] A loop serves to link the crRNA flagpole region (or optionally the first flagpole extension, when present) with the tracr (or optionally the first tracr extension, when present) of a sgRNA. The loop can link the crRNA flagpole region and tracr covalently or non-covalently. In an embodiment, the linkage is covalent. In an embodiment, the loop covalently couples the crRNA flagpole region and tracr. In an embodiment, the loop covalently couples the first flagpole extension and the first tracr extension. In an embodiment, the loop is, or comprises, a covalent bond interposed between the crRNA flagpole region and the domain of the tracr which hybridizes to the crRNA flagpole region. Typically, the loop comprises one or more, e.g., 2, 3, 4, 5, 6, 7, 8, 9, or 10 nucleotides.

[0647] In dgRNA molecules the two molecules can be associated by virtue of the hybridization between at least a portion of the crRNA (e.g., the crRNA flagpole region) and at least a portion of the tracr (e.g., the domain of the tracr which is complementary to the crRNA flagpole region).

[0648] A wide variety of loops are suitable for use in sgRNAs. Loops can consist of a covalent bond, or be as short as one or a few nucleotides, e.g., 1, 2, 3, 4, or 5 nucleotides in length. In an embodiment, a loop is 2, 3, 4, 5, 6, 7, 8, 9, 10, 15, 20, or 25 or more nucleotides in length. In an embodiment, a loop is 2 to 50, 2 to 40, 2 to 30, 2 to 20, 2 to 10, or 2 to 5 nucleotides in length. In an embodiment, a loop shares homology with, or is derived from, a naturally occurring sequence. In an embodiment, the loop has at least 50% homology with a loop disclosed herein. In an embodiment, the loop comprises SEQ ID NO: 6588.

[0649] Some or all of the nucleotides of the domain can have a modification, e.g., modification described in Section XIII herein.

### 4) The Second Flagpole Extension

[0650] In an embodiment, a dgRNA can comprise additional sequence, 3′ to the crRNA flagpole region or, when present, the first flagpole extension, referred to herein as the second flagpole extension. In an embodiment, the second flagpole extension is, 2-10, 2-9, 2-8, 2-7, 2-6, 2-5, or 2-4 nucleotides in length. In an embodiment, the second flagpole extension is 2, 3, 4, 5, 6, 7, 8, 9, or 10 or more nucleotides in length. In an embodiment, the second flagpole extension comprises SEQ ID NO: 6587.

### 5) The Tracr:

[0651] The tracr is the nucleic acid sequence required for nuclease, e.g., Cas9, binding. Without being bound by theory, it is believed that each Cas9 species is associated with a particular tracr sequence. Tracr sequences are utilized in both sgRNA and in dgRNA systems. In an embodiment, the tracr comprises sequence from, or derived from, an S. pyogenes tracr. In some aspects, the tracr has a portion that hybridizes to the flagpole portion of the crRNA, e.g., has sufficient complementarity to the crRNA flagpole region to form a duplexed region under at least some physiological conditions (sometimes referred to herein as the tracr flagpole region or a tracr domain complementary to the crRNA flagpole region). In embodiments, the domain of the tracr that hybridizes with the crRNA flagpole region comprises at least 5, 6, 7, 8, 9, 10, 11, 12, 13, 14, 15, 16, 17, 18, 19, or 20 nucleotides that hybridize with complementary nucleotides of the crRNA flagpole region. In some aspects, the tracr nucleotides that hybridize with complementary nucleotides of the crRNA flagpole region are contiguous. In some aspects, the tracr nucleotides that hybridize with complementary nucleotides of the crRNA flagpole region are discontinuous, e.g., comprises two or more regions of hybridization separated by nucleotides that do not base pair with nucleotides of the crRNA flagpole region. In some aspects, the portion of the tracr that hybridizes to the crRNA flagpole region comprises, from 5′ to 3′: UAGCAAGUUAAAA (SEQ ID NO: 6597. In some aspects, the portion of the tracr that hybridizes to the crRNA flagpole region comprises, from 5′ to 3′: UAGCAAGUUUAAA (SEQ ID NO: 6598). In embodiments, the sequence that hybridizes with the crRNA flagpole region is disposed on the tracr 5′- to the sequence of the tracr that additionally binds a nuclease, e.g., a Cas molecule, e.g., a Cas9 molecule.

[0652] The tracr further comprises a domain that additionally binds to a nuclease, e.g., a Cas molecule, e.g., a Cas9 molecule. Without being bound by theory, it is believed that Cas9 from different species bind to different tracr sequences. In some aspects, the tracr comprises sequence that binds to a S. pyogenes Cas9 molecule. In some aspects, the tracr comprises sequence that binds to a Cas9 molecule disclosed herein. In some aspects, the domain that additionally binds a Cas9 molecule comprises, from 5′ to 3′: UAAGGCUAGUCCGUUAUCAACUUGAAAAAGUGGCACCGAGUCGGUGC (SEQ ID NO: 6599).

[0653] In some aspects the domain that additionally binds a Cas9 molecule comprises, from 5′ to 3′: UAAGGCUAGUCCGUUAUCAACUUGAAAAAGUGGCACCGAGUCGGUGCUUUU (SEQ ID NO: 6600).

[0654] In some embodiments, the tracr comprises SEQ ID NO: 6589. In some embodiments, the tracr comprises SEQ ID NO: 6590.

[0655] Some or all of the nucleotides of the tracr can have a modification, e.g., modification found in Section XIII herein. In embodiments, the gRNA (e.g., the sgRNA or the tracr and/or crRNA of a dgRNA), e.g., any of the gRNA or gRNA components described above, comprises an inverted abasic residue at the 5′ end, the 3′ end or both the 5′ and 3′ end of the gRNA. In embodiments, the gRNA (e.g., the sgRNA or the tracr and/or crRNA of a dgRNA), e.g., any of the gRNA or gRNA components described above, comprises one or more phosphorothioate bonds between residues at the 5′ end of the polynucleotide, for example, a phosphorthioate bond between the first two 5′ residues, between each of the first three 5′ residues, between each of the first four 5′ residues, or between each of the first five 5′ residues. In embodiments, the gRNA or gRNA component may alternatively or additionally comprise one or more phosphorothioate bonds between residues at the 3′ end of the polynucleotide, for example, a phosphorthioate bond between the first two 3′ residues, between each of the first three 3′ residues, between each of the first four 3′ residues, or between each of the first five 3′ residues. In an embodiment, the gRNA (e.g., the sgRNA or the tracr and/or crRNA of a dgRNA), e.g., any of the gRNA or gRNA components described above, comprises a phosphorothioate bond between each of the first four 5′ residues (e.g., comprises, e.g., consists of, three phosphorothioate bonds at the 5′ end(s)), and a phosphorothioate bond between each of the first four 3′ residues (e.g., comprises, e.g., consists of, three phosphorothioate bonds at the 3′ end(s)). In an embodiment, any of the phosphorothioate modifications described above are combined with an inverted abasic residue at the 5′ end, the 3′ end, or both the 5′ and 3′ ends of the polynucleotide. In such embodiments, the inverted abasic nucleotide may be linked to the 5′ and/or 3′ nucleotide by a phosphate bond or a phosphorothioate bond. In embodiments, the gRNA (e.g., the sgRNA or the tracr and/or crRNA of a dgRNA), e.g., any of the gRNA or gRNA components described above, comprises one or more nucleotides that include a 2′ O-methyl modification. In embodiments, each of the first 1, 2, 3, or more of the 5′ residues comprise a 2′ O-methyl modification. In embodiments, each of the first 1, 2, 3, or more of the 3′ residues comprise a 2′ O-methyl modification. In embodiments, the 4th-to-terminal, 3^{rd}-to-terminal, and 2^{nd}-to-terminal 3′ residues comprise a 2′ O-methyl modification. In embodiments, each of the first 1, 2, 3 or more of the 5′ residues comprise a 2′ O-methyl modification, and each of the first 1, 2, 3 or more of the 3′ residues comprise a 2′ O-methyl modification. In an embodiment, each of the first 3 of the 5′ residues comprise a 2′ O-methyl modification, and each of the first 3 of the 3′ residues comprise a 2′ O-methyl modification. In embodiments, each of the first 3 of the 5′ residues comprise a 2′ O-methyl modification, and the 4^{th}-to-terminal, 3^{rd}-to-terminal, and 2^{nd}-to-terminal 3′ residues comprise a 2′ O-methyl modification. In embodiments, any of the 2′ O-methyl modifications, e.g., as described above, may be combined with one or more phosphorothioate modifications, e.g., as described above, and/or one or more inverted abasic modifications, e.g., as described above. In an embodiment, the gRNA (e.g., the sgRNA or the tracr and/or crRNA of a dgRNA), e.g., any of the gRNA or gRNA components described above, comprises, e.g., consists of, a phosphorothioate bond between each of the first four 5′ residues (e.g., comprises, e.g., consists of three phosphorothioate bonds at the 5′ end of the polynucleotide(s)), a phosphorothioate bond between each of the first four 3′ residues (e.g., comprises, e.g., consists of three phosphorothioate bonds at the 5′ end of the polynucleotide(s)), a 2′ O-methyl modification at each of the first three 5′ residues, and a 2′ O-methyl modification at each of the first three 3′ residues. In an embodiment, the gRNA (e.g., the sgRNA or the tracr and/or crRNA of a dgRNA), e.g., any of the gRNA or gRNA components described above, comprises, e.g., consists of, a phosphorothioate bond between each of the first four 5′ residues (e.g., comprises, e.g., consists of three phosphorothioate bonds at the 5′ end of the polynucleotide(s)), a phosphorothioate bond between each of the first four 3′ residues (e.g., comprises, e.g., consists of three phosphorothioate bonds at the 5′ end of the polynucleotide(s)), a 2′ O-methyl modification at each of the first three 5′ residues, and a 2′ O-methyl modification at each of the 4^{th}-to-terminal, 3^{rd}-to-terminal, and 2^{nd}-to-terminal 3′ residues.

[0656] In an embodiment, the gRNA (e.g., the sgRNA or the tracr and/or crRNA of a dgRNA), e.g., any of the gRNA or gRNA components described above, comprises, e.g., consists of, a phosphorothioate bond between each of the first four 5′ residues (e.g., comprises, e.g., consists of three phosphorothioate bonds at the 5′ end of the polynucleotide(s)), a phosphorothioate bond between each of the first four 3′ residues (e.g., comprises, e.g., consists of three phosphorothioate bonds at the 5′ end of the polynucleotide(s)), a 2′ O-methyl modification at each of the first three 5′ residues, a 2′ O-methyl modification at each of the first three 3′ residues, and an additional inverted abasic residue at each of the 5′ and 3′ ends.

[0657] In an embodiment, the gRNA (e.g., the sgRNA or the tracr and/or crRNA of a dgRNA), e.g., any of the gRNA or gRNA components described above, comprises, e.g., consists of, a phosphorothioate bond between each of the first four 5′ residues (e.g., comprises, e.g., consists of three phosphorothioate bonds at the 5′ end of the polynucleotide(s)), a phosphorothioate bond between each of the first four 3′ residues (e.g., comprises, e.g., consists of three phosphorothioate bonds at the 5′ end of the polynucleotide(s)), a 2′ O-methyl modification at each of the first three 5′ residues, and a 2′ O-methyl modification at each of the 4^{th}-to-terminal, 3^{rd}-to-terminal, and 2^{nd}-to-terminal 3′ residues, and an additional inverted abasic residue at each of the 5′ and 3′ ends In embodiments, the gRNA is a dgRNA and comprises, e.g., consists of:

crRNA:
[0658] mN*mN*mN*NNNNNNNNNNNNNNGUUUUAGAGCUAU*mG*mC*mU (SEQ ID NO: 10797), where m indicates a base with 2′O-Methyl modification, * indicates a phosphorothioate bond, and N's indicate the residues of the targeting domain, e.g., as described herein, (optionally with an inverted abasic residue at the 5′ and/or 3′ terminus); and
   tracr:
[0659] AACAGCAUAGCAAGUUAAAAUAAGGCUAGUCCGUUAUCAACUUGAAAAAGUGGCACCGA GUCGGUGCUUUUUUU (SEQ ID NO: 6660) (optionally with an inverted abasic residue at the 5′ and/or 3′ terminus).

[0660] In embodiments, the gRNA is a dgRNA and comprises, e.g., consists of:

crRNA:
[0661] mN*mN*mN*NNNNNNNNN NNNNNGUUUUAGAGCUAU*mG*mC*mU (SEQ ID NO: 10797), where m indicates a base with 2′O-Methyl modification, * indicates a phosphorothioate bond, and N's indicate the residues of the targeting domain, e.g., as described herein, (optionally with an inverted abasic residue at the 5′ and/or 3′ terminus); and
   tracr:
[0662] mA*mA*mC*AGCAUAGCAAGUUAAAAUAAGGCUAGUCCGUUAUCAACUUGAAAAAGUGGC ACCGAGUCGGUGCUUUU*mU*mU*mU (SEQ ID NO: 10798), where m indicates a base with 2′O-Methyl modification, * indicates a phosphorothioate bond, and N's indicate the residues of the targeting domain (optionally with an inverted abasic residue at the 5′ and/or 3′ terminus).

[0663] In embodiments, the gRNA is a dgRNA and comprises, e.g., consists of:

crRNA:
[0664] mN*mN*mN*NNNNNNNNNNNNNNNGUUUUAGAGCUAUGCUGUU*mU*mU*mG (SEQ ID NO:), where m indicates a base with 2′O-Methyl modification, * indicates a phosphorothioate bond, and N's indicate the residues of the targeting domain, e.g., as described herein, (optionally with an inverted abasic residue at the 5′ and/or 3′ terminus); and
   tracr:
[0665] AACAGCAUAGCAAGUUAAAAUAAGGCUAGUCCGUUAUCAACUUGAAAAAGUGGCACCGA GUCGGUGCUUUUUUU (SEQ ID NO: 6660) (optionally with an inverted abasic residue at the 5′ and/or 3′ terminus).

[0666] In embodiments, the gRNA is a dgRNA and comprises, e.g., consists of:

crRNA:
[0667] mN*mN*mN*NNNNNNNNNNNNNNNGUUUUAGAGCUAUGCUGUU*mU*mU*mG (SEQ ID NO:), where m indicates a base with 2′O-Methyl modification, * indicates a phosphorothioate bond, and N's indicate the residues of the targeting domain, e.g., as described herein, (optionally with an inverted abasic residue at the 5′ and/or 3′ terminus); and
   tracr:
[0668] mA*mA*mC*AGCAUAGCAAGUUAAAAUAAGGCUAGUCCGUUAUCAACUUGAAAAAGUGGC ACCGAGUCGGUGCUUUU*mU*mU*mU (SEQ ID NO: 10798), where m indicates a base with 2′O-Methyl modification, and * indicates a phosphorothioate bond (optionally with an inverted abasic residue at the 5′ and/or 3′ terminus).

[0669] In embodiments, the gRNA is a sgRNA and comprises, e.g., consists of:
[0670] mN*mN*mN*NNNNNNNNGUUUUAGAGCUAGAAAUAGCAAGUUAAAAUAAG GCUAGUCCGUUAUCAACUUGAAAAAGUGGCACCGAGUCGGUGCU*mU*mU*mU (SEQ ID NO: 10799), where m indicates a base with 2′O-Methyl modification, * indicates a phosphorothioate bond, and N's indicate the residues of the targeting domain, e.g., as described herein, (optionally with an inverted abasic residue at the 5′ and/or 3′ terminus).

[0671] In embodiments, the gRNA is a sgRNA and comprises, e.g., consists of:
[0672] mN*mN*mN*NNNNNNNNNNNNNNGUUUUAGAGCUAGAAAUAGCAAGUUAAAAUAAG GCUAGUCCGUUAUCAACUUGAAAAAGUGGCACCGAGUCGGUGCmU*mU*mU*U, where m indicates a base with 2′O-Methyl modification, * indicates a phosphorothioate bond, and N's indicate the residues of the targeting domain, e.g., as described herein, (optionally with an inverted abasic residue at the 5′ and/or 3′ terminus).

### 6) First Tracr Extension

[0673] Where the gRNA comprises a first flagpole extension, the tracr may comprise a first tracr extension. The first tracr extension may comprise nucleotides that are complementary, e.g., 80%, 85%, 90%, 95% or 99%, e.g., fully complementary, with nucleotides of the first flagpole extension. In some aspects, the first tracr extension nucleotides that hybridize with complementary nucleotides of the first flagpole extension are contiguous. In some aspects, the first tracr extension nucleotides that hybridize with complementary nucleotides of the first flagpole extension are discontinuous, e.g., comprises two or more regions of hybridization separated by nucleotides that do not base pair with nucleotides of the first flagpole extension. In some aspects, the first tracr extension comprises at least 2, 3, 4, 5, 6, 7, 8, 9, 10, 11, 12, 13, 14, 15, 16, 17, 18, 19, 20 or more nucleotides. In some aspects, the first tracr extension comprises SEQ ID NO: 6591. In some aspects the first tracr extension comprises nucleic acid that is at least 80%, 85%, 90%, 95% or 99% homology to SEQ ID NO: 6591.

[0674] Some or all of the nucleotides of the first tracr extension can have a modification, e.g., modification found in Section XIII herein.

[0675] In some embodiments, the sgRNA may comprise, from 5′ to 3′, disposed 3′ to the targeting domain:

a)
(SEQ ID NO: 6601)
GUUUUAGAGCUAGAAAUAGCAAGUUAAAAUAAGGCUAGUCCGUUAUCAA
CUUGAAAAAGUGGCACCGAGUCGGUGC;
b)
(SEQ ID NO: 6602)
GUUUAAGAGCUAGAAAUAGCAAGUUUAAAUAAGGCUAGUCCGUUAUCAA
CUUGAAAAAGUGGCACCGAGUCGGUGC;
c)
(SEQ ID NO: 6603)
GUUUUAGAGCUAUGCUGGAAACAGCAUAGCAAGUUAAAAUAAGGCUAGU
CCGUUAUCAACUUGAAAAAGUGGCACCGAGUCGGUGC;
d)
(SEQ ID NO: 6604)
GUUUAAGAGCUAUGCUGGAAACAGCAUAGCAAGUUUAAAUAAGGCUAGU
CCGUUAUCAACUUGAAAAAGUGGCACCGAGUCGGUGC;

[0676] e) any of a) to d), above, further comprising, at the 3′ end, at least 1, 2, 3, 4, 5, 6 or 7 uracil (U) nucleotides, e.g., 1, 2, 3, 4, 5, 6, or 7 uracil (U) nucleotides;
[0677] f) any of a) to d), above, further comprising, at the 3′ end, at least 1, 2, 3, 4, 5, 6 or 7 adenine (A) nucleotides, e.g., 1, 2, 3, 4, 5, 6, or 7 adenine (A) nucleotides; or
[0678] g) any of a) to f), above, further comprising, at the 5′ end (e.g., at the 5′ terminus, e.g., 5′ to the targeting domain), at least 1, 2, 3, 4, 5, 6 or 7 adenine (A) nucleotides, e.g., 1, 2, 3, 4, 5, 6, or 7 adenine (A) nucleotides.

[0679] In an embodiment, a sgRNA of the invention comprises, e.g., consists of, from 5′ to 3′: [targeting domain]—

(SEQ ID NO: 7811)
GUUUUAGAGCUAGAAAUAGCAAGUUAAAAUAAGGCUAGUCCGUUAUCAA
CUUGAAAAAGUGGCACCGAGUCGGUGCUUUU.

[0680] In an embodiment, a sgRNA of the invention comprises, e.g., consists of, from 5′ to 3′: [targeting domain]—

(SEQ ID NO: 7807)
GUUUAAGAGCUAUGCUGGAAACAGCAUAGCAAGUUUAAAUAAGGCUAGU
CCGUUAUCAACUUGAAAAAGUGGCACCGAGUCGGUGCUUUU.

[0681] In embodiments, any of a) to g) above is disposed directly 3′ to the targeting domain.

[0682] In some embodiments, the dgRNA may comprise:

[0683] A crRNA comprising, from 5′ to 3′, preferrably disposed directly 3′ to the targeting domain:

a)
(SEQ ID NO: 6584)
GUUUUAGAGCUA;
b)
(SEQ ID NO: 6585)
GUUUAAGAGCUA;
c)
(SEQ ID NO: 6605)
GUUUUAGAGCUAUGCUG;
d)
(SEQ ID NO: 6606)
GUUUAAGAGCUAUGCUG;
e)
(SEQ ID NO: 6607)
GUUUUAGAGCUAUGCUGUUUUG;
f)
(SEQ ID NO: 6608)
GUUUAAGAGCUAUGCUGUUUUG;
or
g)
(SEQ ID NO: 7806)
GUUUUAGAGCUAUGCU:

and a tracr comprising, from 5′ to 3′:

a)
(SEQ ID NO: 6589)
UAGCAAGUUAAAAUAAGGCUAGUCCGUUAUCAACUUGAAAAAGUGGCAC
CGAGUCGGUGC;
b)
(SEQ ID NO: 6590)
UAGCAAGUUUAAAUAAGGCUAGUCCGUUAUCAACUUGAAAAAGUGGCAC
CGAGUCGGUGC;
c)
(SEQ ID NO: 6609)
CAGCAUAGCAAGUUAAAAUAAGGCUAGUCCGUUAUCAACUUGAAAAAGU
GGCACCGAGUCGGUGC;
d)
(SEQ ID NO: 6610)
CAGCAUAGCAAGUUUAAAUAAGGCUAGUCCGUUAUCAACUUGAAAAAGU
GGCACCGAGUCGGUGC;
e)
(SEQ ID NO: 6660)
AACAGCAUAGCAAGUUAAAAUAAGGCUAGUCCGUUAUCAACUUGAAAAA
GUGGCACCGAGUCGGUGCUUUUUUU;
f)
(SEQ ID NO: 6661)
AACAGCAUAGCAAGUUUAAAUAAGGCUAGUCCGUUAUCAACUUGAAAAA
GUGGCACCGAGUCGGUGCUUUUUUU;
g)
(SEQ ID NO: 7807)
GUUUAAGAGCUAUGCUGGAAACAGCAUAGCAAGUUUAAAUAAGGCUAGU
CCGUUAUCAACUUGAAAAAGUGGCACCGAGUCGGUGCUUUU;
h)
(SEQ ID NO: 7808)
AGCAUAGCAAGUUAAAAUAAGGCUAGUCCGUUAUCAACUUGAAAAAGUG
GCACCGAGUCGGUGCUUU;
i)
(SEQ ID NO: 7809)
GUUGGAACCAUUCAAAACAGCAUAGCAAGUUAAAAUAAGGCUAGUCCGU
UAUCAACUUGAAAAAGUGGCACCGAGUCGGUGCUUU;
j)
(SEQ ID NO: 7820)
AACAGCAUAGCAAGUUAAAAUAAGGCUAGUCCGUUAUCAACUUGAAAAA
GUGGCACCGAGUCGGUGC;

[0684] k) any of a) to j), above, further comprising, at the 3′ end, at least 1, 2, 3, 4, 5, 6 or 7 uracil (U) nucleotides, e.g., 1, 2, 3, 4, 5, 6, or 7 uracil (U) nucleotides;
[0685] l) any of a) to j), above, further comprising, at the 3′ end, at least 1, 2, 3, 4, 5, 6 or 7 adenine (A) nucleotides, e.g., 1, 2, 3, 4, 5, 6, or 7 adenine (A) nucleotides; or
[0686] m) any of a) to l), above, further comprising, at the 5′ end (e.g., at the 5′ terminus), at least 1, 2, 3, 4, 5, 6 or 7 adenine (A) nucleotides, e.g., 1, 2, 3, 4, 5, 6, or 7 adenine (A) nucleotides.

[0687] In an embodiment, the sequence of k), above comprises the 3′ sequence UUUUUU, e.g., if a U6 promoter is used for transcription. In an embodiment, the sequence of k), above, comprises the 3′ sequence UUUU, e.g., if an HI promoter is used for transcription. In an embodiment, sequence of k), above, comprises variable numbers of 3′ U's depending, e.g., on the termination signal of the pol-III promoter used. In an embodiment, the sequence of k), above, comprises variable 3′ sequence derived from the DNA template if a T7 promoter is used. In an embodiment, the sequence of k), above, comprises variable 3′ sequence derived from the DNA template, e.g., if in vitro transcription is used to generate the RNA molecule. In an embodiment, the sequence of k), above, comprises variable 3′ sequence derived from the DNA template, e.g, if a pol-II promoter is used to drive transcription.

[0688] In an embodiment, the crRNA comprises SEQ ID NO: 6607 and the tracr comprises, e.g., consists of

(SEQ ID NO: 6660)
AACAGCAUAGCAAGUUAAAAUAAGGCUAGUCCGUUAUCAACUUGAAAAA
GUGGCACCGAGUCGGUGCUUUUUUU.

[0689] In an embodiment, the crRNA comprises SEQ ID NO: 6608 and the tracr comprises, e.g., consists of,

(SEQ ID NO: 6661)
AACAGCAUAGCAAGUUUAAAUAAGGCUAGUCCGUUAUCAACUUGAAAAA
GUGGCACCGAGUCGGUGCUUUUUUU.

[0690] In an embodiment, the crRNA comprises, e.g., consists of, a targeting domain and, disposed 3′ to the targeting domain (e.g., disposed directly 3′ to the targeting domain), a sequence comprising, e.g., consisting of, GUUUUAGAGCUAUGCU (SEQ ID NO: 7806), and the tracr comprises, e.g., consists of,

(SEQ ID NO: 7807)
GUUUAAGAGCUAUGCUGGAAACAGCAUAGCAAGUUUAAAUAAGGCUAGU
CCGUUAUCAACUUGAAAAAGUGGCACCGAGUCGGUGCUUUU.

[0691] In an embodiment, the crRNA comprises, e.g., consists of, a targeting domain and, disposed 3′ to the targeting domain (e.g., disposed directly 3′ to the targeting domain), a sequence comprising, e.g., consisting of, GUUUUAGAGCUAUGCU (SEQ ID NO: 7806), and the tracr comprises, e.g., consists of,

(SEQ ID NO: 7808)
AGCAUAGCAAGUUAAAAUAAGGCUAGUCCGUUAU
CAACUUGAAAAAGUGGCACCGAGUCGGUGCUUU.

[0692] In an embodiment, the crRNA comprises, e.g., consists of, a targeting domain and, disposed 3′ to the targeting domain (e.g., disposed directly 3′ to the targeting domain), a sequence comprising, e.g., consisting of, GUUUUAGAGCUAUGCUGUUUUG (SEQ ID NO: 6607), and the tracr comprises, e.g., consists of,

(SEQ ID NO: 7809)
GUUGGAACCAUUCAAAACAGCAUAGCAAGUUAAAAUAAGGCUAGUCCGU
UAUCAACUUGAAAAAGUGGCACCGAGUCGGUGCUUU.

7) Targeting Domains Useful for Altering Expression of Allogeneic T Cell Targets, Inhibitory Molecules and/or Downstream Effectors of an Inhibitory Molecule

[0693] Provided in the tables below are targeting domains for gRNA molecules for use in the compositions and methods of the present invention, for example, in altering expression of or altering a Allogeneic T Cell Target gene, Inhibitory Molecule gene and/or a Downstream Effectors of An Inhibitory Molecule gene.

Lengthy table referenced here
US20240417722A1-20241219-T00001
Please refer to the end of the specification for access instructions.

Lengthy table referenced here
US20240417722A1-20241219-T00002
Please refer to the end of the specification for access instructions.

[0694] Exemplary preferred gRNA targeting domains useful in the compositions and methods of the invention are described in the tables below.

TABLE 3
gRNA Targeting Domains for human B2M

| | | | | gRNA Targeting | SEQ ID |
|---|---|---|---|---|---|
| Id. | Locations | Target | Strand | Domain Sequence | NO: |
| CR00438 | Chr15:44711472- | B2M | + | CACGCGUUUAAUAUAAGUGG | 5492 |
| | 44711494 | | | | |
| CR00439 | Chr15:44711483- | B2M | + | UAUAAGUGGAGGCGUCGCGC | 5493 |
| | 44711505 | | | | |
| CR00440 | Chr15:44711486- | B2M | + | AAGUGGAGGCGUCGCGCUGG | 5494 |
| | 44711508 | | | | |
| CR00441 | Chr15:44711534- | B2M | + | GGCCGAGAUGUCUCGCUCCG | 5495 |
| | 44711556 | | | | |
| CR00442 | Chr15:44711536- | B2M | − | GGCCACGGAGCGAGACAUCU | 5496 |
| | 44711558 | | | | |
| CR00443 | Chr15:44711551- | B2M | − | CGCGAGCACAGCUAAGGCCA | 5497 |
| | 44711573 | | | | |
| CR00444 | Chr15:44711557- | B2M | − | GAGUAGCGCGAGCACAGCUA | 5498 |
| | 44711579 | | | | |
| CR00445 | Chr15:44711591- | B2M | − | ACUCACGCUGGAUAGCCUCC | 5499 |
| | 44711613 | | | | |
| CR00446 | Chr15:44711603- | B2M | − | AGGGUAGGAGAGACUCACGC | 5500 |
| | 44711625 | | | | |
| CR00447 | Chr15:44715412- | B2M | + | CUCAGGUACUCCAAAGAUUC | 5501 |
| | 44715434 | | | | |
| CR00448 | Chr15:44715422- | B2M | − | CGUGAGUAAACCUGAAUCUU | 5502 |
| | 44715444 | | | | |
| CR00449 | Chr15:44715507- | B2M | − | CAGUAAGUCAACUUCAAUGU | 5503 |
| | 44715529 | | | | |
| CR00450 | Chr15:44715567- | B2M | + | ACUUGUCUUUCAGCAAGGAC | 5504 |
| | 44715589 | | | | |
| CR00451 | Chr15:44715645- | B2M | − | AGUCACAUGGUUCACACGGC | 5505 |
| | 44715667 | | | | |
| CR00452 | Chr15:44715649- | B2M | − | ACAAAGUCACAUGGUUCACA | 5506 |
| | 44715671 | | | | |
| CR00453 | Chr15:44715672- | B2M | + | CACAGCCCAAGAUAGUUAAG | 5507 |
| | 44715694 | | | | |
| CR00454 | Chr15:44715673- | B2M | + | ACAGCCCAAGAUAGUUAAGU | 5508 |
| | 44715695 | | | | |
| CR00455 | Chr15:44715677- | B2M | − | UUACCCCACUUAACUAUCUU | 5509 |
| | 44715699 | | | | |
| CR00456 | Chr15:44715678- | B2M | − | CUUACCCCACUUAACUAUCU | 5510 |
| | 44715700 | | | | |
| CR00457 | Chr15:44717599- | B2M | + | AGGUUUGAAGAUGCCGCAUU | 5511 |
| | 44717621 | | | | |
| CR00458 | Chr15:44717604- | B2M | + | UGAAGAUGCCGCAUUUGGAU | 5512 |
| | 44717626 | | | | |
| CR00459 | Chr15:44717612- | B2M | − | GAAUUCAUCCAAUCCAAAUG | 5513 |
| | 44717634 | | | | |
| CR00460 | Chr15:44717681- | B2M | + | ACACUUUAUGCACAAAAUGU | 5514 |
| | 44717703 | | | | |
| CR00461 | Chr15:44717763- | B2M | − | CUGCUCAGAUACAUCAAACA | 5515 |
| | 44717785 | | | | |
| CR00462 | Chr15:44717764- | B2M | + | CAUGUUUGAUGUAUCUGAGC | 5516 |
| | 44717786 | | | | |
| CR00463 | Chr15:44717776- | B2M | + | AUCUGAGCAGGUUGCUCCAC | 5517 |
| | 44717798 | | | | |
| CR00464 | Chr15:44717789- | B2M | + | GCUCCACAGGUAGCUCUAGG | 5518 |
| | 44717811 | | | | |
| CR00465 | Chr15:44717805- | B2M | + | UAGGAGGGCUGGCAACUUAG | 5519 |
| | 44717827 | | | | |
| CR00466 | Chr15:44717808- | B2M | + | GAGGGCUGGCAACUUAGAGG | 5520 |
| | 44717830 | | | | |
| CR00467 | Chr15:44717809- | B2M | + | AGGGCUGGCAACUUAGAGGU | 5521 |
| | 44717831 | | | | |
| CR00468 | Chr15:44717810- | B2M | + | GGGCUGGCAACUUAGAGGUG | 5522 |
| | 44717832 | | | | |
| CR00469 | Chr15:44717851- | B2M | − | UCUGACCAAGAUGUUGAUGU | 5523 |
| | 44717873 | | | | |
| CR00470 | Chr15:44717939- | B2M | − | UCUAAGCAGAGUAUGUAAAU | 5524 |
| | 44717961 | | | | |
| CR00471 | Chr15:44717981- | B2M | + | AAUAUAAUUGACAGGAUUAU | 5525 |
| | 44718003 | | | | |
| CR00472 | Chr15:44718056- | B2M | + | CUUAUACAUUUGAUAAAGUA | 5526 |
| | 44718078 | | | | |
| CR00473 | Chr15:44718076- | B2M | + | AGGCAUGGUUGUGGUUAAUC | 5527 |
| | 44718098 | | | | |

[0695] In the various aspects of the invention, the gRNA molecule may include a targeting domain listed above. In an embodiment, the targeting domain of the gRNA of the invention comprises, e.g. consists of, the targeting domain of CR00465. In an embodiment, the targeting domain of the gRNA of the invention comprises, e.g. consists of, the targeting domain of CR00443. In an embodiment, the targeting domain of the gRNA of the invention comprises, e.g. consists of, the targeting domain of CR00445. In an embodiment, the targeting domain of the gRNA of the invention comprises, e.g. consists of, the targeting domain of CR00444. In an embodiment, the targeting domain of the gRNA of the invention comprises, e.g. consists of, the targeting domain of CR00449. In an embodiment, the targeting domain of the gRNA of the invention comprises, e.g. consists of, the targeting domain of CR00442. In an embodiment, the targeting domain of the gRNA of the invention comprises, e.g. consists of, the targeting domain of CR00453. In an embodiment, the targeting domain of the gRNA of the invention comprises, e.g. consists of, the targeting domain of CR00461. In an embodiment, the targeting domain of the gRNA of the invention comprises, e.g. consists of, the targeting domain of CR00439. In an embodiment, the targeting domain of the gRNA of the invention comprises, e.g. consists of, the targeting domain of CR00452. In an embodiment, the targeting domain of the gRNA of the invention comprises, e.g. consists of, the targeting domain of CR00455. In an embodiment, the targeting domain of the gRNA of the invention comprises, e.g. consists of, the targeting domain of CR00463. In an embodiment, the targeting domain of the gRNA of the invention comprises, e.g. consists of, the targeting domain of CR00467. In an embodiment, the targeting domain of the gRNA of the invention comprises, e.g. consists of, the targeting domain of CR00466. In an embodiment, the targeting domain of the gRNA of the invention comprises, e.g. consists of, the targeting domain of CR00446. In an embodiment, the targeting domain of the gRNA of the invention comprises, e.g. consists of, the targeting domain of CR00440. In an embodiment, the targeting domain of the gRNA of the invention comprises, e.g. consists of, the targeting domain of CR00454. In an embodiment, the targeting domain of the gRNA of the invention comprises, e.g. consists of, the targeting domain of CR00460. In an embodiment, the targeting domain of the gRNA of the invention comprises, e.g. consists of, the targeting domain of CR00438. In an embodiment, the targeting domain of the gRNA of the invention comprises, e.g. consists of, the targeting domain of CR00439. Such gRNA molecules, and combinations thereof, are suitable for use in, for example, the CRISPR systems, methods and cells and other aspects of the invention described herein.

TABLE 4
gRNA targeting domain sequences for human T-Cell Receptor Alpha (TRAC)

| | Target | | Genomic | gRNA Targeting Domain | SEQ ID |
|---|---|---|---|---|---|
| Id. | Name | Strand | Information | Sequence | NO: |
| CR000920 | TRAC | + | Chr14: 22281089- | CUCAAGGUUCAGAUCAG | 5528 |
| | | | 22281111 | AAG | |
| CR000921 | TRAC | + | Chr14: 22281092- | AAGGUUCAGAUCAGAAG | 5529 |
| | | | 22281114 | AGG | |
| CR000922 | TRAC | + | Chr14: 22281111- | GAGGCUUCUCACCCUGC | 5530 |
| | | | 22281133 | AGC | |
| CR000923 | TRAC | + | Chr14: 22281112- | AGGCUUCUCACCCUGCA | 5531 |
| | | | 22281134 | GCA | |
| CR000924 | TRAC | − | Chr14: 22281122- | GCUCACAGGUCCCUGCU | 5532 |
| | | | 22281144 | GCA | |
| CR000925 | TRAC | − | Chr14: 22281123- | UGCUCACAGGUCCCUGC | 5533 |
| | | | 22281145 | UGC | |
| CR000926 | TRAC | + | Chr14: 22281126- | GCAGCAGGGACCUGUGA | 5534 |
| | | | 22281148 | GCA | |
| CR000927 | TRAC | + | Chr14: 22281136- | CCUGUGAGCAUGGCAUG | 5535 |
| | | | 22281158 | CCC | |
| CR000928 | TRAC | − | Chr14: 22281136- | CCAGGGCAUGCCAUGCU | 5536 |
| | | | 22281158 | CAC | |
| CR000929 | TRAC | − | Chr14: 22281153- | CAAGUGCCCACAGGAAG | 5537 |
| | | | 22281175 | CCA | |
| CR000930 | TRAC | − | Chr14: 22281154- | ACAAGUGCCCACAGGAA | 5538 |
| | | | 22281176 | GCC | |
| CR000931 | TRAC | − | Chr14: 22281162- | UGGAGAUCACAAGUGCC | 5539 |
| | | | 22281184 | CAC | |
| CR000932 | TRAC | − | Chr14: 22281182- | GCCUUCCUUACCAAGAC | 5540 |
| | | | 22281204 | AGG | |
| CR000933 | TRAC | − | Chr14: 22281185- | UGCGCCUUCCUUACCAA | 5541 |
| | | | 22281207 | GAC | |
| CR000934 | TRAC | + | Chr14: 22281432- | CUUUCCCACAGAAUUUA | 5542 |
| | | | 22281454 | GCA | |
| CR000935 | TRAC | + | Chr14: 22281477- | ACCAGAGAUGUCUGUGC | 5543 |
| | | | 22281499 | AGG | |
| CR000936 | TRAC | − | Chr14: 22281478- | GCCUCCUGCACAGACAUC | 5544 |
| | | | 22281500 | UC | |
| CR000937 | TRAC | − | Chr14: 22281506- | AUAUGUGCAGCUCAGGG | 5545 |
| | | | 22281528 | UCA | |
| CR000938 | TRAC | − | Chr14: 22281512- | GGUGUCAUAUGUGCAGC | 5546 |
| | | | 22281534 | UCA | |
| CR000939 | TRAC | − | Chr14: 22281513- | UGGUGUCAUAUGUGCAG | 5547 |
| | | | 22281535 | CUC | |
| CR000940 | TRAC | − | Chr14: 22281533- | UAAAUAAUAAUCACUCU | 5548 |
| | | | 22281555 | CAC | |
| CR000941 | TRAC | + | Chr14: 22281539- | AGAGUGAUUAUUAUUUA | 5549 |
| | | | 22281561 | UUC | |
| CR000942 | TRAC | + | Chr14: 22281560- | GGUACAAGCAGCCUCCC | 5550 |
| | | | 22281582 | AGC | |
| CR000943 | TRAC | − | Chr14: 22281571- | AGAAUCAUCUGCCUGCU | 5551 |
| | | | 22281593 | GGG | |
| CR000944 | TRAC | − | Chr14: 22281574- | ACGAGAAUCAUCUGCCU | 5552 |
| | | | 22281596 | GCU | |
| CR000945 | TRAC | − | Chr14: 22281575- | AACGAGAAUCAUCUGCC | 5553 |
| | | | 22281597 | UGC | |
| CR000946 | TRAC | − | Chr14: 22281603- | UCUGUUGCUUAUAAGCU | 5554 |
| | | | 22281625 | UCU | |
| CR000947 | TRAC | − | Chr14: 22338946- | GUUGGUGAGGUUGAUAA | 5555 |
| | | | 22338968 | AUU | |
| CR000948 | TRAC | − | Chr14: 22338959- | GCUGUAUGUGUGAGUUG | 5556 |
| | | | 22338981 | GUG | |
| CR000949 | TRAC | + | Chr14: 22338963- | ACCAACUCACACAUACA | 5557 |
| | | | 22338985 | GCC | |
| CR000950 | TRAC | + | Chr14: 22338964- | CCAACUCACACAUACAGC | 5558 |
| | | | 22338986 | CA | |
| CR000951 | TRAC | − | Chr14: 22338981- | AGCACAAGAAUAUAGAU | 5559 |
| | | | 22339003 | CCC | |
| CR000952 | TRAC | + | Chr14: 22338992- | UAUUCUUGUGCUCUCAG | 5560 |
| | | | 22339014 | AGA | |
| CR000953 | TRAC | + | Chr14: 22513941- | GGAAACACACCUCUUGU | 5561 |
| | | | 22513963 | CUU | |
| CR000954 | TRAC | + | Chr14: 22513946- | CACACCUCUUGUCUUUG | 5562 |
| | | | 22513968 | GAA | |
| CR000955 | TRAC | + | Chr14: 22513947- | ACACCUCUUGUCUUUGG | 5563 |
| | | | 22513969 | AAA | |
| CR000956 | TRAC | − | Chr14: 22513950- | GUGCCCUUUCCAAAGAC | 5564 |
| | | | 22513972 | AAG | |
| CR000957 | TRAC | − | Chr14: 22547504- | ACACGGCAGGGUCAGGG | 5565 |
| | | | 22547526 | UUC | |
| CR000958 | TRAC | − | Chr14: 22547511- | AGCUGGUACACGGCAGG | 5566 |
| | | | 22547533 | GUC | |
| CR000959 | TRAC | − | Chr14: 22547516- | CUCUCAGCUGGUACACG | 5567 |
| | | | 22547538 | GCA | |
| CR000960 | TRAC | − | Chr14: 22547517- | UCUCUCAGCUGGUACAC | 5568 |
| | | | 22547539 | GGC | |
| CR000961 | TRAC | − | Chr14: 22547521- | AGAGUCUCUCAGCUGGU | 5569 |
| | | | 22547543 | ACA | |
| CR000962 | TRAC | − | Chr14: 22547528- | UGGAUUUAGAGUCUCUC | 5570 |
| | | | 22547550 | AGC | |
| CR000963 | TRAC | − | Chr14: 22547548- | UAGGCAGACAGACUUGU | 5571 |
| | | | 22547570 | CAC | |
| CR000964 | TRAC | − | Chr14: 22547567- | GAGAAUCAAAAUCGGUG | 5572 |
| | | | 22547589 | AAU | |
| CR000965 | TRAC | − | Chr14: 22547575- | AUUUGUUUGAGAAUCAA | 5573 |
| | | | 22547597 | AAU | |
| CR000966 | TRAC | + | Chr14: 22547591- | AACAAAUGUGUCACAAA | 5574 |
| | | | 22547613 | GUA | |
| CR000967 | TRAC | + | Chr14: 22547635- | ACAAAACUGUGCUAGAC | 5575 |
| | | | 22547657 | AUG | |
| CR000968 | TRAC | + | Chr14: 22547642- | UGUGCUAGACAUGAGGU | 5576 |
| | | | 22547664 | CUA | |
| CR000969 | TRAC | + | Chr14: 22547666- | CUUCAAGAGCAACAGUG | 5577 |
| | | | 22547688 | CUG | |
| CR000970 | TRAC | + | Chr14: 22547671- | AGAGCAACAGUGCUGUG | 5578 |
| | | | 22547693 | GCC | |
| CR000971 | TRAC | − | Chr14: 22547689- | AAAGUCAGAUUUGUUGC | 5579 |
| | | | 22547711 | UCC | |
| CR000972 | TRAC | − | Chr14: 22547725- | UGGAAUAAUGCUGUUGU | 5580 |
| | | | 22547747 | UGA | |
| CR000973 | TRAC | − | Chr14: 22547745- | CUGGGGAAGAAGGUGUC | 5581 |
| | | | 22547767 | UUC | |
| CR000974 | TRAC | − | Chr14: 22547762- | AGCUGCCCUUACCUGGG | 5582 |
| | | | 22547784 | CUG | |
| CR000975 | TRAC | − | Chr14: 22547763- | AAGCUGCCCUUACCUGG | 5583 |
| | | | 22547785 | GCU | |
| CR000976 | TRAC | − | Chr14: 22547764- | AAAGCUGCCCUUACCUG | 5584 |
| | | | 22547786 | GGC | |
| CR000977 | TRAC | − | Chr14: 22547768- | CACCAAAGCUGCCCUUAC | 5585 |
| | | | 22547790 | CU | |
| CR000978 | TRAC | − | Chr14: 22547769- | GCACCAAAGCUGCCCUU | 5586 |
| | | | 22547791 | ACC | |
| CR000979 | TRAC | + | Chr14: 22549633- | AAGUUCCUGUGAUGUCA | 5587 |
| | | | 22549655 | AGC | |
| CR000980 | TRAC | − | Chr14: 22549638- | CUCGACCAGCUUGACAU | 5588 |
| | | | 22549660 | CAC | |
| CR000981 | TRAC | − | Chr14: 22550558- | CUGACAGGUUUUGAAAG | 5589 |
| | | | 22550580 | UUU | |
| CR000982 | TRAC | + | Chr14: 22550565- | UUUCAAAACCUGUCAGU | 5590 |
| | | | 22550587 | GAU | |
| CR000983 | TRAC | + | Chr14: 22550566- | UUCAAAACCUGUCAGUG | 5591 |
| | | | 22550588 | AUU | |
| CR000984 | TRAC | − | Chr14: 22550573- | UUCGGAACCCAAUCACU | 5592 |
| | | | 22550595 | GAC | |
| CR000985 | TRAC | + | Chr14: 22550591- | CCGAAUCCUCCUCCUGAA | 5593 |
| | | | 22550613 | AG | |
| CR000986 | TRAC | − | Chr14: 22550591- | CCACUUUCAGGAGGAGG | 5594 |
| | | | 22550613 | AUU | |
| CR000987 | TRAC | + | Chr14: 22550595- | AUCCUCCUCCUGAAAGU | 5595 |
| | | | 22550617 | GGC | |
| CR000988 | TRAC | + | Chr14: 22550596- | UCCUCCUCCUGAAAGUG | 5596 |
| | | | 22550618 | GCC | |
| CR000989 | TRAC | − | Chr14: 22550597- | ACCCGGCCACUUUCAGG | 5597 |
| | | | 22550619 | AGG | |
| CR000990 | TRAC | − | Chr14: 22550600- | UAAACCCGGCCACUUUC | 5598 |
| | | | 22550622 | AGG | |
| CR000991 | TRAC | − | Chr14: 22550603- | GAUUAAACCCGGCCACU | 5599 |
| | | | 22550625 | UUC | |
| CR000992 | TRAC | − | Chr14: 22550614- | CGUCAUGAGCAGAUUAA | 5600 |
| | | | 22550636 | ACC | |
| CR000993 | TRAC | + | Chr14: 22550620- | UUAAUCUGCUCAUGACG | 5601 |
| | | | 22550642 | CUG | |
| CR000994 | TRAC | + | Chr14: 22550626- | UGCUCAUGACGCUGCGG | 5602 |
| | | | 22550648 | CUG | |
| CR000995 | TRAC | − | Chr14: 22550650- | UCAAGGCCCCUCACCUCA | 5603 |
| | | | 22550672 | GC | |
| CR000996 | TRAC | − | Chr14: 22551620- | AGGAAGGAGCGAGGGAG | 5604 |
| | | | 22551642 | CAC | |
| CR000997 | TRAC | − | Chr14: 22551628- | CAAUGCAGAGGAAGGAG | 5605 |
| | | | 22551650 | CGA | |
| CR000998 | TRAC | − | Chr14: 22551629- | GCAAUGCAGAGGAAGGA | 5606 |
| | | | 22551651 | GCG | |
| CR000999 | TRAC | − | Chr14: 22551636- | AAGAGGGGCAAUGCAGA | 5607 |
| | | | 22551658 | GGA | |
| CR001000 | TRAC | − | Chr14: 22551640- | GGAGAAGAGGGGCAAUG | 5608 |
| | | | 22551662 | CAG | |
| CR001001 | TRAC | − | Chr14: 22551653- | UCUGUUUGGAGAGGGAG | 5609 |
| | | | 22551675 | AAG | |
| CR001002 | TRAC | + | Chr14: 22551655- | UCUUCUCCCUCUCCAAAC | 5610 |
| | | | 22551677 | AG | |
| CR001003 | TRAC | + | Chr14: 22551656- | CUUCUCCCUCUCCAAACA | 5611 |
| | | | 22551678 | GA | |
| CR001004 | TRAC | − | Chr14: 22551661- | GAGUUCCCUCUGUUUGG | 5612 |
| | | | 22551683 | AGA | |
| CR001005 | TRAC | − | Chr14: 22551662- | AGAGUUCCCUCUGUUUG | 5613 |
| | | | 22551684 | GAG | |
| CR001006 | TRAC | − | Chr14: 22551667- | GUAGGAGAGUUCCCUCU | 5614 |
| | | | 22551689 | GUU | |
| CR001007 | TRAC | + | Chr14: 22551678- | GAACUCUCCUACCCCCAA | 5615 |
| | | | 22551700 | GG | |
| CR001008 | TRAC | − | Chr14: 22551685- | GCUUUCACCUCCUUGGG | 5616 |
| | | | 22551707 | GGU | |
| CR001009 | TRAC | − | Chr14: 22551689- | AGCAGCUUUCACCUCCU | 5617 |
| | | | 22551711 | UGG | |
| CR001010 | TRAC | − | Chr14: 22551690- | UAGCAGCUUUCACCUCC | 5618 |
| | | | 22551712 | UUG | |
| CR001011 | TRAC | − | Chr14: 22551691- | GUAGCAGCUUUCACCUC | 5619 |
| | | | 22551713 | CUU | |
| CR001012 | TRAC | + | Chr14: 22551710- | CUACCACCUCUGUGCCCC | 5620 |
| | | | 22551732 | CC | |
| CR001013 | TRAC | − | Chr14: 22551713- | UUGCCGGGGGGGCACAG | 5621 |
| | | | 22551735 | AGG | |
| CR001014 | TRAC | − | Chr14: 22551716- | GCAUUGCCGGGGGGGCA | 5622 |
| | | | 22551738 | CAG | |
| CR001015 | TRAC | − | Chr14: 22551724- | AGUUGGUGGCAUUGCCG | 5623 |
| | | | 22551746 | GGG | |

[0696] In the various aspects of the invention, the gRNA molecule may include a targeting domain listed above. In an embodiment, the targeting domain of the gRNA of the invention comprises, e.g. consists of, the targeting domain of CR000961. In an embodiment, the targeting domain of the gRNA of the invention comprises, e.g. consists of, the targeting domain of CR000977. In an embodiment, the targeting domain of the gRNA of the invention comprises, e.g. consists of, the targeting domain of CR000984. In an embodiment, the targeting domain of the gRNA of the invention comprises, e.g. consists of, the targeting domain of CR000993. In an embodiment, the targeting domain of the gRNA of the invention comprises, e.g. consists of, the targeting domain of CR000981. In an embodiment, the targeting domain of the gRNA of the invention comprises, e.g. consists of, the targeting domain of CR000992. In an embodiment, the targeting domain of the gRNA of the invention comprises, e.g. consists of, the targeting domain of CR000986. In an embodiment, the targeting domain of the gRNA of the invention comprises, e.g. consists of, the targeting domain of CR000963. In an embodiment, the targeting domain of the gRNA of the invention comprises, e.g. consists of, the targeting domain of CR000985. In an embodiment, the targeting domain of the gRNA of the invention comprises, e.g. consists of, the targeting domain of CR000966. In an embodiment, the targeting domain of the gRNA of the invention comprises, e.g. consists of, the targeting domain of CR000990. In an embodiment, the targeting domain of the gRNA of the invention comprises, e.g. consists of, the targeting domain of CR000978. In an embodiment, the targeting domain of the gRNA of the invention comprises, e.g. consists of, the targeting domain of CR000991. In an embodiment, the targeting domain of the gRNA of the invention comprises, e.g. consists of, the targeting domain of CR000983. In an embodiment, the targeting domain of the gRNA of the invention comprises, e.g. consists of, the targeting domain of CR000960. In an embodiment, the targeting domain of the gRNA of the invention comprises, e.g. consists of, the targeting domain of CR001002. In an embodiment, the targeting domain of the gRNA of the invention comprises, e.g. consists of, the targeting domain of CR001000. In an embodiment, the targeting domain of the gRNA of the invention comprises, e.g. consists of, the targeting domain of CR001009. In an embodiment, the targeting domain of the gRNA of the invention comprises, e.g. consists of, the targeting domain of CR001011. In an embodiment, the targeting domain of the gRNA of the invention comprises, e.g. consists of, the targeting domain of CR001012. Such gRNA molecules, and combinations thereof, are suitable for use in, for example, the CRISPR systems, methods and cells and other aspects of the invention described herein.

TABLE 5
gRNA targeting domains for human T-Cell Receptor Beta (Constant Domain 1 and Constant
Domain 2)

| | Target | gRNA Targeting Domain | | SEQ ID |
|---|---|---|---|---|
| Id. | Name | Sequence | Genomic Information | NO: |
| CR000728 | TRBC1 | CAGGGAAGAAGCCUGUGGCC | Chr7: 142791779- | 5624 |
| | | | 142791801 | |
| CR000729 | TRBC1 | GUGGUCAGGGAAGAAGCCUG | Chr7: 142791784- | 5625 |
| | | | 142791806 | |
| CR000730 | TRBC1 | CUGACCACGUGGAGCUGAGC | Chr7: 142791799- | 5626 |
| | | | 142791821 | |
| CR000731 | TRBC1 | CACGGACCCGCAGCCCCUCA | Chr7: 142791857- | 5627 |
| | | | 142791879 | |
| CR000732 | TRBC1 | GGUGCACAGUGGGGUCAGCA | Chr7: 142791839- | 5628 |
| | | | 142791861 | |
| CR000733 | TRBC1 | GACGGGUUUGGCCCUAUCCU | Chr7: 142792015- | 5629 |
| | | | 142792037 | |
| CR000734 | TRBC1 | UGGCUCAAACACAGCGACCU | Chr7: 142791712- | 5630 |
| | | | 142791734 | |
| CR000735 | TRBC1 | AGGCUUCUUCCCUGACCACG | Chr7: 142791788- | 5631 |
| | | | 142791810 | |
| CR000736 | TRBC1 | CAGCUCAGCUCCACGUGGUC | Chr7: 142791798- | 5632 |
| | | | 142791820 | |
| CR000737 | TRBC1 | GCGCUGACGAUCUGGGUGAC | Chr7: 142792032- | 5633 |
| | | | 142792054 | |
| CR000738 | TRBC1 | CUUUCCAGAGGACCUGAACA | Chr7: 142791680- | 5634 |
| | | | 142791702 | |
| CR000739 | TRBC1 | UCAAACACAGCGACCUCGGG | Chr7: 142791708- | 5635 |
| | | | 142791730 | |
| CR000740 | TRBC1 | UGACGGGUUUGGCCCUAUCC | Chr7: 142792016- | 5636 |
| | | | 142792038 | |
| CR000741 | TRBC1 | GGCGCUGACGAUCUGGGUGA | Chr7: 142792033- | 5637 |
| | | | 142792055 | |
| CR000742 | TRBC1 | CGGGUGGGAACACCUUGUUC | Chr7: 142791692- | 5638 |
| | | | 142791714 | |
| CR000743 | TRBC1 | GAACAAGGUGUUCCCACCCG | Chr7: 142791695- | 5639 |
| | | | 142791717 | |
| CR000744 | TRBC1 | CAAACACAGCGACCUCGGGU | Chr7: 142791707- | 5640 |
| | | | 142791729 | |
| CR000745 | TRBC1 | GGCUCAAACACAGCGACCUC | Chr7: 142791711- | 5641 |
| | | | 142791733 | |
| CR000746 | TRBC1 | AGCUCAGCUCCACGUGGUCA | Chr7: 142791797- | 5642 |
| | | | 142791819 | |
| CR000747 | TRBC1 | GACGAUCUGGGUGACGGGUU | Chr7: 142792027- | 5643 |
| | | | 142792049 | |
| CR000748 | TRBC2 | UAUCAGGCUCCUCUGCUACG | Chr7: 142670776- | 5644 |
| | | | 142670798 | |
| CR000749 | TRBC2 | AUCAGGCUCCUCUGCUACGU | Chr7: 142670777- | 5645 |
| | | | 142670799 | |
| CR000750 | TRBC2 | CUACGUGGGCUUUUAUUUUC | Chr7: 142670791- | 5646 |
| | | | 142670813 | |
| CR000751 | TRBC2 | ACGUGGGCUUUUAUUUUCUG | Chr7: 142670793- | 5647 |
| | | | 142670815 | |
| CR000752 | TRBC2 | CGUGGGCUUUUCUUUUCUGG | Chr7: 142670794- | 5648 |
| | | | 142670816 | |
| CR000753 | TRBC2 | AAUAAAAGCCCACGUAGCAG | Chr7: 142670785- | 5649 |
| | | | 142670807 | |
| CR000754 | TRBC2 | ACCCCAAGAUACCUUGUUAU | Chr7: 142670970- | 5650 |
| | | | 142670992 | |
| CR000755 | TRBC2 | AGAUACCUUGUUAUAGGGAC | Chr7: 142670976- | 5651 |
| | | | 142670998 | |
| CR000756 | TRBC2 | GACAGGAAAGAAGAUCACUC | Chr7: 142670993- | 5652 |
| | | | 142671015 | |
| CR000757 | TRBC2 | UCUGGAAUGUUCUCAAACCA | Chr7: 142671011- | 5653 |
| | | | 142671033 | |
| CR000758 | TRBC2 | CUGGAAUGUUCUCAAACCAU | Chr7: 142671012- | 5654 |
| | | | 142671034 | |
| CR000759 | TRBC2 | UACUGGUAUCAACAAGAUCC | Chr7: 142671048- | 5655 |
| | | | 142671070 | |
| CR000760 | TRBC2 | GUAUCAACAAGAUCCAGGAA | Chr7: 142671053- | 5656 |
| | | | 142671075 | |
| CR000761 | TRBC2 | CACCUCAUCCACUAUUCCUA | Chr7: 142671081- | 5657 |
| | | | 142671103 | |
| CR000762 | TRBC2 | GGAGUUAAUUCCACAGAGAA | Chr7: 142671102- | 5658 |
| | | | 142671124 | |
| CR000763 | TRBC2 | AGUCAACAGUCUCCAGAAUA | Chr7: 142671139- | 5659 |
| | | | 142671161 | |
| CR000764 | TRBC2 | AACAGUCUCCAGAAUAAGGA | Chr7: 142671143- | 5660 |
| | | | 142671165 | |
| CR000765 | TRBC2 | CCCUGACCCUGGAGUCUGCC | Chr7: 142671175- | 5661 |
| | | | 142671197 | |
| CR000766 | TRBC2 | UAACAAGGUAUCUUGGGGUC | Chr7: 142670966- | 5662 |
| | | | 142670988 | |
| CR000767 | TRBC2 | CCCUAUAACAAGGUAUCUUG | Chr7: 142670971- | 5663 |
| | | | 142670993 | |
| CR000768 | TRBC2 | UCCCUAUAACAAGGUAUCUU | Chr7: 142670972- | 5664 |
| | | | 142670994 | |
| CR000769 | TRBC2 | GUCCCUAUAACAAGGUAUCU | Chr7: 142670973- | 5665 |
| | | | 142670995 | |
| CR000770 | TRBC2 | UCUUUCCUGUCCCUAUAACA | Chr7: 142670981- | 5666 |
| | | | 142671003 | |
| CR000771 | TRBC2 | GAUACCAGUACAUUUUGUCA | Chr7: 142671035- | 5667 |
| | | | 142671057 | |
| CR000772 | TRBC2 | AUGAGGUGUAGUUCCAUUCC | Chr7: 142671066- | 5668 |
| | | | 142671088 | |
| CR000773 | TRBC2 | CUCCAUAGGAAUAGUGGAUG | Chr7: 142671083- | 5669 |
| | | | 142671105 | |
| CR000774 | TRBC2 | AAUUAACUCCAUAGGAAUAG | Chr7: 142671089- | 5670 |
| | | | 142671111 | |
| CR000775 | TRBC2 | CUCUGUGGAAUUAACUCCAU | Chr7: 142671097- | 5671 |
| | | | 142671119 | |
| CR000776 | TRBC2 | UCUGGAGACUGUUGACUCAG | Chr7: 142671133- | 5672 |
| | | | 142671155 | |
| CR000777 | TRBC2 | AAAAUGCUCCGUCCUUAUUC | Chr7: 142671151- | 5673 |
| | | | 142671173 | |
| CR000778 | TRBC2 | CCUGGCAGACUCCAGGGUCA | Chr7: 142671175- | 5674 |
| | | | 142671197 | |
| CR000779 | TRBC2 | GCCUGGCAGACUCCAGGGUC | Chr7: 142671176- | 5675 |
| | | | 142671198 | |
| CR000780 | TRBC2 | UGAGGGCCUGGCAGACUCCA | Chr7: 142671181- | 5676 |
| | | | 142671203 | |
| CR000781 | TRBC2 | GUGAGGGCCUGGCAGACUCC | Chr7: 142671182- | 5677 |
| | | | 142671204 | |
| CR000782 | TRBC2 | GAGGUACUGAGAGGUAUGUG | Chr7: 142671199- | 5678 |
| | | | 142671221 | |
| CR000783 | TRBC2 | GCUGGCACAGAGGUACUGAG | Chr7: 142671208- | 5679 |
| | | | 142671230 | |
| CR000784 | TRBC2 | UGUAUUCACUGCUGGCACAG | Chr7: 142671218- | 5680 |
| | | | 142671240 | |
| CR000785 | TRBC2 | GAGCUGUCUGGUUCUGGUAG | Chr7: 142791626- | 5681 |
| | | | 142791648 | |
| CR000786 | TRBC2 | AGAGCUGUCUGGUUCUGGUA | Chr7: 142791627- | 5682 |
| | | | 142791649 | |
| CR000787 | TRBC2 | GAGAGCUGUCUGGUUCUGGU | Chr7: 142791628- | 5683 |
| | | | 142791650 | |
| CR000788 | TRBC2 | CUCUGAGAGCUGUCUGGUUC | Chr7: 142791632- | 5684 |
| | | | 142791654 | |
| CR000789 | TRBC2 | GGGUUGCUCUGAGAGCUGUC | Chr7: 142791638- | 5685 |
| | | | 142791660 | |
| CR000790 | TRBC2 | GAAAAACGUGUUCCCACCCA | Chr7: 142801042- | 5686 |
| | | | 142801064 | |
| CR000791 | TRBC2 | AGGCUUCUACCCCGACCACG | Chr7: 142801135- | 5687 |
| | | | 142801157 | |
| CR000792 | TRBC2 | CCGACCACGUGGAGCUGAGC | Chr7: 142801146- | 5688 |
| | | | 142801168 | |
| CR000793 | TRBC2 | CACAGACCCGCAGCCCCUCA | Chr7: 142801204- | 5689 |
| | | | 142801226 | |
| CR000794 | TRBC2 | UGGGUGGGAACACGUUUUUC | Chr7: 142801039- | 5690 |
| | | | 142801061 | |
| CR000795 | TRBC2 | CAAACACAGCGACCUUGGGU | Chr7: 142801054- | 5691 |
| | | | 142801076 | |
| CR000796 | TRBC2 | UCAAACACAGCGACCUUGGG | Chr7: 142801055- | 5692 |
| | | | 142801077 | |
| CR000797 | TRBC2 | GGCUCAAACACAGCGACCUU | Chr7: 142801058- | 5693 |
| | | | 142801080 | |
| CR000798 | TRBC2 | UGGCUCAAACACAGCGACCU | Chr7: 142801059- | 5694 |
| | | | 142801081 | |
| CR000799 | TRBC2 | CGGGGUAGAAGCCUGUGGCC | Chr7: 142801126- | 5695 |
| | | | 142801148 | |
| CR000800 | TRBC2 | GUGGUCGGGGUAGAAGCCUG | Chr7: 142801131- | 5696 |
| | | | 142801153 | |
| CR000801 | TRBC2 | AGCUCAGCUCCACGUGGUCG | Chr7: 142801144- | 5697 |
| | | | 142801166 | |
| CR000802 | TRBC2 | CAGCUCAGCUCCACGUGGUC | Chr7: 142801145- | 5698 |
| | | | 142801167 | |
| CR000803 | TRBC2 | CCAGCUCAGCUCCACGUGGU | Chr7: 142801146- | 5699 |
| | | | 142801168 | |
| CR000804 | TRBC2 | GACAGGUUUGGCCCUAUCCU | Chr7: 142801362- | 5700 |
| | | | 142801384 | |
| CR000805 | TRBC2 | UGACAGGUUUGGCCCUAUCC | Chr7: 142801363- | 5701 |
| | | | 142801385 | |
| CR000806 | TRBC2 | GACGAUCUGGGUGACAGGUU | Chr7: 142801374- | 5702 |
| | | | 142801396 | |
| CR000807 | TRBC2 | GCGCUGACGAUCUGGGUGAC | Chr7: 142801379- | 5703 |
| | | | 142801401 | |
| CR000808 | TRBC2 | CCCUGUUUUCUUUCAGACUG | Chr7: 142801922- | 5704 |
| | | | 142801944 | |
| CR000809 | TRBC2 | AGGAGAGACUCACUUACCGG | Chr7: 142801950- | 5705 |
| | | | 142801972 | |
| CR000810 | TRBC2 | AAAAGGAGAGACUCACUUAC | Chr7: 142801953- | 5706 |
| | | | 142801975 | |
| CR000811 | TRBC2 | UCAACAGAGUCUUACCAGCA | Chr7: 142802092- | 5707 |
| | | | 142802114 | |
| CR000812 | TRBC2 | CAACAGAGUCUUACCAGCAA | Chr7: 142802093- | 5708 |
| | | | 142802115 | |
| CR000813 | TRBC2 | AACAGAGUCUUACCAGCAAG | Chr7: 142802094- | 5709 |
| | | | 142802116 | |
| CR000814 | TRBC2 | AUCCUCUAUGAGAUCUUGCU | Chr7: 142802131- | 5710 |
| | | | 142802153 | |
| CR000815 | TRBC2 | UCCUCUAUGAGAUCUUGCUA | Chr7: 142802132- | 5711 |
| | | | 142802154 | |
| CR000816 | TRBC2 | CUAUGAGAUCUUGCUAGGGA | Chr7: 142802136- | 5712 |
| | | | 142802158 | |
| CR000817 | TRBC2 | GGCCACCUUGUAUGCCGUGC | Chr7: 142802157- | 5713 |
| | | | 142802179 | |
| CR000818 | TRBC2 | GGUCAGUGCCCUCGUGCUGA | Chr7: 142802178- | 5714 |
| | | | 142802200 | |
| CR000819 | TRBC2 | UGGCAGACAGGACCCCUUGC | Chr7: 142802106- | 5715 |
| | | | 142802128 | |
| CR000820 | TRBC2 | CAUAGAGGAUGGUGGCAGAC | Chr7: 142802118- | 5716 |
| | | | 142802140 | |
| CR000821 | TRBC2 | CAAGAUCUCAUAGAGGAUGG | Chr7: 142802126- | 5717 |
| | | | 142802148 | |
| CR000822 | TRBC2 | UAGCAAGAUCUCAUAGAGGA | Chr7: 142802129- | 5718 |
| | | | 142802151 | |
| CR000823 | TRBC2 | UCCCUAGCAAGAUCUCAUAG | Chr7: 142802133- | 5719 |
| | | | 142802155 | |

[0697] In the various aspects of the invention, the gRNA molecule may include a targeting domain listed above. In an embodiment, the targeting domain of the gRNA of the invention comprises, e.g. consists of, the targeting domain of CR000823. In an embodiment, the targeting domain of the gRNA of the invention comprises, e.g. consists of, the targeting domain of CR000798. In an embodiment, the targeting domain of the gRNA of the invention comprises, e.g. consists of, the targeting domain of CR000810. In an embodiment, the targeting domain of the gRNA of the invention comprises, e.g. consists of, the targeting domain of CR000800. In an embodiment, the targeting domain of the gRNA of the invention comprises, e.g. consists of, the targeting domain of CR000815. In an embodiment, the targeting domain of the gRNA of the invention comprises, e.g. consists of, the targeting domain of CR000812. In an embodiment, the targeting domain of the gRNA of the invention comprises, e.g. consists of, the targeting domain of CR000813. In an embodiment, the targeting domain of the gRNA of the invention comprises, e.g. consists of, the targeting domain of CR000816. In an embodiment, the targeting domain of the gRNA of the invention comprises, e.g. consists of, the targeting domain of CR000807. In an embodiment, the targeting domain of the gRNA of the invention comprises, e.g. consists of, the targeting domain of CR000811. In an embodiment, the targeting domain of the gRNA of the invention comprises, e.g. consists of, the targeting domain of CR000791. In an embodiment, the targeting domain of the gRNA of the invention comprises, e.g. consists of, the targeting domain of CR000809. In an embodiment, the targeting domain of the gRNA of the invention comprises, e.g. consists of, the targeting domain of CR000817. In an embodiment, the targeting domain of the gRNA of the invention comprises, e.g. consists of, the targeting domain of CR000819. In an embodiment, the targeting domain of the gRNA of the invention comprises, e.g. consists of, the targeting domain of CR000814. Such gRNA molecules, and combinations thereof, are suitable for use in, for example, the CRISPR systems, methods and cells and other aspects of the invention described herein.

TABLE 6
gRNA Targeting Domains for human PDCD1

| | Target | gRNA Targeting Domain | | SEQ |
|---|---|---|---|---|
| Id. | Name | Sequence | Genomic Information | ID NO: |
| CR000824 | PDCD1 | UCAGGCGGAGGUGAGCGGAA | Chr2: 241858873- | 5720 |
| | | | 241858895 | |
| CR000825 | PDCD1 | CUCAGGCGGAGGUGAGCGGA | Chr2: 241858872- | 5721 |
| | | | 241858894 | |
| CR000826 | PDCD1 | ACUGCUCAGGCGGAGGUGAG | Chr2: 241858868- | 5722 |
| | | | 241858890 | |
| CR000827 | PDCD1 | GCUCACCUCCGCCUGAGCAG | Chr2: 241858866- | 5723 |
| | | | 241858888 | |
| CR000828 | PDCD1 | CUUCUCCACUGCUCAGGCGG | Chr2: 241858861- | 5724 |
| | | | 241858883 | |
| CR000829 | PDCD1 | CAGUGGAGAAGGCGGCACUC | Chr2: 241858849- | 5725 |
| | | | 241858871 | |
| CR000830 | PDCD1 | UGGAGAAGGCGGCACUCUGG | Chr2: 241858846- | 5726 |
| | | | 241858868 | |
| CR000831 | PDCD1 | GGAGAAGGCGGCACUCUGGU | Chr2: 241858845- | 5727 |
| | | | 241858867 | |
| CR000832 | PDCD1 | GAGAAGGCGGCACUCUGGUG | Chr2: 241858844- | 5728 |
| | | | 241858866 | |
| CR000833 | PDCD1 | AGGCGCCCUGGCCAGUCGUC | Chr2: 241858797- | 5729 |
| | | | 241858819 | |
| CR000834 | PDCD1 | GGCGCCCUGGCCAGUCGUCU | Chr2: 241858796- | 5730 |
| | | | 241858818 | |
| CR000835 | PDCD1 | GCCCUGGCCAGUCGUCUGGG | Chr2: 241858793- | 5731 |
| | | | 241858815 | |
| CR000836 | PDCD1 | CACCGCCCAGACGACUGGCC | Chr2: 241858791- | 5732 |
| | | | 241858813 | |
| CR000837 | PDCD1 | UGUAGCACCGCCCAGACGAC | Chr2: 241858786- | 5733 |
| | | | 241858808 | |
| CR000838 | PDCD1 | CGUCUGGGCGGUGCUACAAC | Chr2: 241858781- | 5734 |
| | | | 241858803 | |
| CR000839 | PDCD1 | GUCUGGGCGGUGCUACAACU | Chr2: 241858780- | 5735 |
| | | | 241858802 | |
| CR000840 | PDCD1 | GGGCGGUGCUACAACUGGGC | Chr2: 241858776- | 5736 |
| | | | 241858798 | |
| CR000841 | PDCD1 | CGGUGCUACAACUGGGCUGG | Chr2: 241858773- | 5737 |
| | | | 241858795 | |
| CR000842 | PDCD1 | CACCUACCUAAGAACCAUCC | Chr2: 241858750- | 5738 |
| | | | 241858772 | |
| CR000843 | PDCD1 | GAGAAGGUGGGGGGGUUCCA | Chr2: 241852938- | 5739 |
| | | | 241852960 | |
| CR000844 | PDCD1 | CGGUCACCACGAGCAGGGCU | Chr2: 241852915- | 5740 |
| | | | 241852937 | |
| CR000845 | PDCD1 | UCGGUCACCACGAGCAGGGC | Chr2: 241852914- | 5741 |
| | | | 241852936 | |
| CR000846 | PDCD1 | GCCCUGCUCGUGGUGACCGA | Chr2: 241852911- | 5742 |
| | | | 241852933 | |
| CR000847 | PDCD1 | CCCUUCGGUCACCACGAGCA | Chr2: 241852910- | 5743 |
| | | | 241852932 | |
| CR000848 | PDCD1 | CCCUGCUCGUGGUGACCGAA | Chr2: 241852910- | 5744 |
| | | | 241852932 | |
| CR000849 | PDCD1 | CCCCUUCGGUCACCACGAGC | Chr2: 241852909- | 5745 |
| | | | 241852931 | |
| CR000850 | PDCD1 | CCUGCUCGUGGUGACCGAAG | Chr2: 241852909- | 5746 |
| | | | 241852931 | |
| CR000851 | PDCD1 | GAAGGUGGCGUUGUCCCCUU | Chr2: 241852895- | 5747 |
| | | | 241852917 | |
| CR000852 | PDCD1 | GUUGGAGAAGCUGCAGGUGA | Chr2: 241852877- | 5748 |
| | | | 241852899 | |
| CR000853 | PDCD1 | CACGAAGCUCUCCGAUGUGU | Chr2: 241852859- | 5749 |
| | | | 241852881 | |
| CR000854 | PDCD1 | CGGAGAGCUUCGUGCUAAAC | Chr2: 241852850- | 5750 |
| | | | 241852872 | |
| CR000855 | PDCD1 | UCUGGUUGCUGGGGCUCAUG | Chr2: 241852825- | 5751 |
| | | | 241852847 | |
| CR000856 | PDCD1 | GCUUGUCCGUCUGGUUGCUG | Chr2: 241852816- | 5752 |
| | | | 241852838 | |
| CR000857 | PDCD1 | AGCUUGUCCGUCUGGUUGCU | Chr2: 241852815- | 5753 |
| | | | 241852837 | |
| CR000858 | PDCD1 | CAGCUUGUCCGUCUGGUUGC | Chr2: 241852814- | 5754 |
| | | | 241852836 | |
| CR000859 | PDCD1 | CAGCAACCAGACGGACAAGC | Chr2: 241852813- | 5755 |
| | | | 241852835 | |
| CR000860 | PDCD1 | AGGCGGCCAGCUUGUCCGUC | Chr2: 241852807- | 5756 |
| | | | 241852829 | |
| CR000861 | PDCD1 | CUGGCUGCGGUCCUCGGGGA | Chr2: 241852787- | 5757 |
| | | | 241852809 | |
| CR000862 | PDCD1 | CGGGCUGGCUGCGGUCCUCG | Chr2: 241852783- | 5758 |
| | | | 241852805 | |
| CR000863 | PDCD1 | CCGGGCUGGCUGCGGUCCUC | Chr2: 241852782- | 5759 |
| | | | 241852804 | |
| CR000864 | PDCD1 | CCCGAGGACCGCAGCCAGCC | Chr2: 241852782- | 5760 |
| | | | 241852804 | |
| CR000865 | PDCD1 | GCCGGGCUGGCUGCGGUCCU | Chr2: 241852781- | 5761 |
| | | | 241852803 | |
| CR000866 | PDCD1 | CGGAAGCGGCAGUCCUGGCC | Chr2: 241852764- | 5762 |
| | | | 241852786 | |
| CR000867 | PDCD1 | ACGGAAGCGGCAGUCCUGGC | Chr2: 241852763- | 5763 |
| | | | 241852785 | |
| CR000868 | PDCD1 | UGACACGGAAGCGGCAGUCC | Chr2: 241852759- | 5764 |
| | | | 241852781 | |
| CR000869 | PDCD1 | GCAGUUGUGUGACACGGAAG | Chr2: 241852750- | 5765 |
| | | | 241852772 | |
| CR000870 | PDCD1 | CGUGUCACACAACUGCCCAA | Chr2: 241852743- | 5766 |
| | | | 241852765 | |
| CR000871 | PDCD1 | GUGUCACACAACUGCCCAAC | Chr2: 241852742- | 5767 |
| | | | 241852764 | |
| CR000872 | PDCD1 | AUGUGGAAGUCACGCCCGUU | Chr2: 241852728- | 5768 |
| | | | 241852750 | |
| CR000873 | PDCD1 | CAUGUGGAAGUCACGCCCGU | Chr2: 241852727- | 5769 |
| | | | 241852749 | |
| CR000874 | PDCD1 | GCGUGACUUCCACAUGAGCG | Chr2: 241852720- | 5770 |
| | | | 241852742 | |
| CR000875 | PDCD1 | ACUUCCACAUGAGCGUGGUC | Chr2: 241852715- | 5771 |
| | | | 241852737 | |
| CR000876 | PDCD1 | CUUCCACAUGAGCGUGGUCA | Chr2: 241852714- | 5772 |
| | | | 241852736 | |
| CR000877 | PDCD1 | GGGCCCUGACCACGCUCAUG | Chr2: 241852711- | 5773 |
| | | | 241852733 | |
| CR000878 | PDCD1 | ACAUGAGCGUGGUCAGGGCC | Chr2: 241852709- | 5774 |
| | | | 241852731 | |
| CR000879 | PDCD1 | AGGGCCCGGCGCAAUGACAG | Chr2: 241852695- | 5775 |
| | | | 241852717 | |
| CR000880 | PDCD1 | GGUGCCGCUGUCAUUGCGCC | Chr2: 241852691- | 5776 |
| | | | 241852713 | |
| CR000881 | PDCD1 | AGGUGCCGCUGUCAUUGCGC | Chr2: 241852690- | 5777 |
| | | | 241852712 | |
| CR000882 | PDCD1 | GACAGCGGCACCUACCUCUG | Chr2: 241852680- | 5778 |
| | | | 241852702 | |
| CR000883 | PDCD1 | ACAGCGGCACCUACCUCUGU | Chr2: 241852679- | 5779 |
| | | | 241852701 | |
| CR000884 | PDCD1 | CCAGGGAGAUGGCCCCACAG | Chr2: 241852666- | 5780 |
| | | | 241852688 | |
| CR000885 | PDCD1 | GAUCUGCGCCUUGGGGGCCA | Chr2: 241852649- | 5781 |
| | | | 241852671 | |
| CR000886 | PDCD1 | UGAUCUGCGCCUUGGGGGCC | Chr2: 241852648- | 5782 |
| | | | 241852670 | |
| CR000887 | PDCD1 | CUCUUUGAUCUGCGCCUUGG | Chr2: 241852643- | 5783 |
| | | | 241852665 | |
| CR000888 | PDCD1 | UCUCUUUGAUCUGCGCCUUG | Chr2: 241852642- | 5784 |
| | | | 241852664 | |
| CR000889 | PDCD1 | CUCUCUUUGAUCUGCGCCUU | Chr2: 241852641- | 5785 |
| | | | 241852663 | |
| CR000890 | PDCD1 | GCUCUCUUUGAUCUGCGCCU | Chr2: 241852640- | 5786 |
| | | | 241852662 | |
| CR000891 | PDCD1 | CGCAGAUCAAAGAGAGCCUG | Chr2: 241852634- | 5787 |
| | | | 241852656 | |
| CR000892 | PDCD1 | GCAGAUCAAAGAGAGCCUGC | Chr2: 241852633- | 5788 |
| | | | 241852655 | |
| CR000893 | PDCD1 | AGAGCCUGCGGGCAGAGCUC | Chr2: 241852622- | 5789 |
| | | | 241852644 | |
| CR000894 | PDCD1 | AGGGUUUGGAACUGGCCGGC | Chr2: 241852278- | 5790 |
| | | | 241852300 | |
| CR000895 | PDCD1 | CACCAGGGUUUGGAACUGGC | Chr2: 241852274- | 5791 |
| | | | 241852296 | |
| CR000896 | PDCD1 | CGGCCAGUUCCAAACCCUGG | Chr2: 241852273- | 5792 |
| | | | 241852295 | |
| CR000897 | PDCD1 | CAACCACCAGGGUUUGGAAC | Chr2: 241852270- | 5793 |
| | | | 241852292 | |
| CR000898 | PDCD1 | CAGUUCCAAACCCUGGUGGU | Chr2: 241852269- | 5794 |
| | | | 241852291 | |
| CR000899 | PDCD1 | CGACACCAACCACCAGGGUU | Chr2: 241852264- | 5795 |
| | | | 241852286 | |
| CR000900 | PDCD1 | AACCCUGGUGGUUGGUGUCG | Chr2: 241852261- | 5796 |
| | | | 241852283 | |
| CR000901 | PDCD1 | ACCCUGGUGGUUGGUGUCGU | Chr2: 241852260- | 5797 |
| | | | 241852282 | |
| CR000902 | PDCD1 | GCCCACGACACCAACCACCA | Chr2: 241852259- | 5798 |
| | | | 241852281 | |
| CR000903 | PDCD1 | CGCCCACGACACCAACCACC | Chr2: 241852258- | 5799 |
| | | | 241852280 | |
| CR000904 | PDCD1 | CUGGUGGUUGGUGUCGUGGG | Chr2: 241852257- | 5800 |
| | | | 241852279 | |
| CR000905 | PDCD1 | UGGUGUCGUGGGCGGCCUGC | Chr2: 241852249- | 5801 |
| | | | 241852271 | |
| CR000906 | PDCD1 | GGUGUCGUGGGCGGCCUGCU | Chr2: 241852248- | 5802 |
| | | | 241852270 | |
| CR000907 | PDCD1 | GGUGCUGCUAGUCUGGGUCC | Chr2: 241852219- | 5803 |
| | | | 241852241 | |
| CR000908 | PDCD1 | UCCUGGCCGUCAUCUGCUCC | Chr2: 241852202- | 5804 |
| | | | 241852224 | |
| CR000909 | PDCD1 | CCCGGGAGCAGAUGACGGCC | Chr2: 241852201- | 5805 |
| | | | 241852223 | |
| CR000910 | PDCD1 | CCUGGCCGUCAUCUGCUCCC | Chr2: 241852201- | 5806 |
| | | | 241852223 | |
| CR000911 | PDCD1 | GACGUUACCUCGUGCGGCCC | Chr2: 241852184- | 5807 |
| | | | 241852206 | |
| CR000912 | PDCD1 | UGACGUUACCUCGUGCGGCC | Chr2: 241852183- | 5808 |
| | | | 241852205 | |
| CR000913 | PDCD1 | UGGGAUGACGUUACCUCGUG | Chr2: 241852178- | 5809 |
| | | | 241852200 | |
| CR000914 | PDCD1 | CUGCAGGGACAAUAGGAGCC | Chr2: 241851961- | 5810 |
| | | | 241851983 | |
| CR000915 | PDCD1 | ACAAUAGGAGCCAGGCGCAC | Chr2: 241851953- | 5811 |
| | | | 241851975 | |
| CR000916 | PDCD1 | CAGGGGCUGGCCGGUGCGCC | Chr2: 241851943- | 5812 |
| | | | 241851965 | |
| CR000917 | PDCD1 | AAAAGAGUGAGACUCACCAG | Chr2: 241851926- | 5813 |
| | | | 241851948 | |
| CR000918 | PDCD1 | GAAAAGAGUGAGACUCACCA | Chr2: 241851925- | 5814 |
| | | | 241851947 | |
| CR000919 | PDCD1 | GGAAAAGAGUGAGACUCACC | Chr2: 241851924- | 5815 |
| | | | 241851946 | |

[0698] In the various aspects of the invention, the gRNA molecule may include a targeting domain listed above. In an embodiment, the targeting domain of the gRNA of the invention comprises, e.g. consists of, the targeting domain of CR000847. In an embodiment, the targeting domain of the gRNA of the invention comprises, e.g. consists of, the targeting domain of CR000902. In an embodiment, the targeting domain of the gRNA of the invention comprises, e.g. consists of, the targeting domain of CR000852. In an embodiment, the targeting domain of the gRNA of the invention comprises, e.g. consists of, the targeting domain of CR000826. In an embodiment, the targeting domain of the gRNA of the invention comprises, e.g. consists of, the targeting domain of CR000904. In an embodiment, the targeting domain of the gRNA of the invention comprises, e.g. consists of, the targeting domain of CR000839. In an embodiment, the targeting domain of the gRNA of the invention comprises, e.g. consists of, the targeting domain of CR000828. In an embodiment, the targeting domain of the gRNA of the invention comprises, e.g. consists of, the targeting domain of CR000835. In an embodiment, the targeting domain of the gRNA of the invention comprises, e.g. consists of, the targeting domain of CR000829. In an embodiment, the targeting domain of the gRNA of the invention comprises, e.g. consists of, the targeting domain of CR000879. In an embodiment, the targeting domain of the gRNA of the invention comprises, e.g. consists of, the targeting domain of CR000870. In an embodiment, the targeting domain of the gRNA of the invention comprises, e.g. consists of, the targeting domain of CR000831. In an embodiment, the targeting domain of the gRNA of the invention comprises, e.g. consists of, the targeting domain of CR000848. In an embodiment, the targeting domain of the gRNA of the invention comprises, e.g. consists of, the targeting domain of CR000855. In an embodiment, the targeting domain of the gRNA of the invention comprises, e.g. consists of, the targeting domain of CR000838. Such gRNA molecules, and combinations thereof, are suitable for use in, for example, the CRISPR systems, methods and cells, and other aspects of the invention described herein.

TABLE 6b
gRNA Targeting Domains for human FKBP1A

| | | | Target Sequence | gRNA Targeting Domain | SEQ ID |
|---|---|---|---|---|---|
| ID | Target | Strand | Location | Sequence | NO: |
| CR002054 | FKBP1A | − | Chr20: 1393120- | CGCACGCAGGGCUGGGC | 6662 |
| | | | 1393142 | GUG | |
| CR002055 | FKBP1A | − | Chr20: 1393119- | GCACGCAGGGCUGGGCG | 6663 |
| | | | 1393141 | UGA | |
| CR002056 | FKBP1A | − | Chr20: 1393118- | CACGCAGGGCUGGGCGU | 6664 |
| | | | 1393140 | GAG | |
| CR002057 | FKBP1A | − | Chr20: 1393117- | ACGCAGGGCUGGGCGUG | 6665 |
| | | | 1393139 | AGG | |
| CR002058 | FKBP1A | − | Chr20: 1393101- | GAGGGGGCGUGCGCGUG | 6666 |
| | | | 1393123 | CGC | |
| CR002059 | FKBP1A | − | Chr20: 1393088- | CGUGCGCAGGCGACGCG | 6667 |
| | | | 1393110 | CCG | |
| CR002060 | FKBP1A | − | Chr20: 1393081- | AGGCGACGCGCCGAGGU | 6668 |
| | | | 1393103 | ACU | |
| CR002061 | FKBP1A | + | Chr20: 1393071- | CACGGCUCUGCCUAGUA | 6669 |
| | | | 1393093 | CCU | |
| CR002062 | FKBP1A | − | Chr20: 1393070- | CGAGGUACUAGGCAGAG | 6670 |
| | | | 1393092 | CCG | |
| CR002063 | FKBP1A | − | Chr20: 1393057- | AGAGCCGUGGAACCGCC | 6671 |
| | | | 1393079 | GCC | |
| CR002064 | FKBP1A | + | Chr20: 1393053- | GCGACCUGGCGGCGGUU | 6672 |
| | | | 1393075 | CCA | |
| CR002065 | FKBP1A | − | Chr20: 1393047- | AACCGCCGCCAGGUCGC | 6673 |
| | | | 1393069 | UGU | |
| CR002066 | FKBP1A | + | Chr20: 1393045- | GACCAACAGCGACCUGG | 6674 |
| | | | 1393067 | CGG | |
| CR002067 | FKBP1A | + | Chr20: 1393042- | GUGGACCAACAGCGACC | 6675 |
| | | | 1393064 | UGG | |
| CR002068 | FKBP1A | + | Chr20: 1393039- | GGCGUGGACCAACAGCG | 6676 |
| | | | 1393061 | ACC | |
| CR002069 | FKBP1A | + | Chr20: 1393023- | GGGCGGCGCGACGGGCG | 6677 |
| | | | 1393045 | GCG | |
| CR002070 | FKBP1A | + | Chr20: 1393018- | CGGGCGGGCGGCGCGAC | 6678 |
| | | | 1393040 | GGG | |
| CR002071 | FKBP1A | + | Chr20: 1393015- | GAGCGGGCGGGCGGCGC | 6679 |
| | | | 1393037 | GAC | |
| CR002072 | FKBP1A | + | Chr20: 1393014- | UGAGCGGGCGGGCGGCG | 6680 |
| | | | 1393036 | CGA | |
| CR002073 | FKBP1A | + | Chr20: 1393006- | GCGGACGCUGAGCGGGC | 6681 |
| | | | 1393028 | GGG | |
| CR002074 | FKBP1A | + | Chr20: 1393003- | GCGGCGGACGCUGAGCG | 6682 |
| | | | 1393025 | GGC | |
| CR002075 | FKBP1A | + | Chr20: 1393002- | GGCGGCGGACGCUGAGC | 6683 |
| | | | 1393024 | GGG | |
| CR002076 | FKBP1A | + | Chr20: 1392999- | GGCGGCGGCGGACGCUG | 6684 |
| | | | 1393021 | AGC | |
| CR002077 | FKBP1A | + | Chr20: 1392998- | UGGCGGCGGCGGACGCU | 6685 |
| | | | 1393020 | GAG | |
| CR002078 | FKBP1A | − | Chr20: 1392995- | CUCAGCGUCCGCCGCCG | 6686 |
| | | | 1393017 | CCA | |
| CR002079 | FKBP1A | − | Chr20: 1392994- | UCAGCGUCCGCCGCCGC | 6687 |
| | | | 1393016 | CAU | |
| CR002080 | FKBP1A | + | Chr20: 1392987- | CUGCACUCCCAUGGCGG | 6688 |
| | | | 1393009 | CGG | |
| CR002081 | FKBP1A | − | Chr20: 1392986- | CGCCGCCGCCAUGGGAG | 6689 |
| | | | 1393008 | UGC | |
| CR002082 | FKBP1A | + | Chr20: 1392984- | CACCUGCACUCCCAUGG | 6690 |
| | | | 1393006 | CGG | |
| CR002083 | FKBP1A | − | Chr20: 1392983- | CGCCGCCAUGGGAGUGC | 6691 |
| | | | 1393005 | AGG | |
| CR002084 | FKBP1A | + | Chr20: 1392981- | UUCCACCUGCACUCCCA | 6692 |
| | | | 1393003 | UGG | |
| CR002085 | FKBP1A | + | Chr20: 1392978- | GGUUUCCACCUGCACUC | 6693 |
| | | | 1393000 | CCA | |
| CR002086 | FKBP1A | − | Chr20: 1392967- | CAGGUGGAAACCAUCUC | 6694 |
| | | | 1392989 | CCC | |
| CR002087 | FKBP1A | + | Chr20: 1392957- | CUCACCGUCUCCUGGGG | 6695 |
| | | | 1392979 | AGA | |
| CR002088 | FKBP1A | + | Chr20: 1392951- | CCACUACUCACCGUCUC | 6696 |
| | | | 1392973 | CUG | |
| CR002089 | FKBP1A | + | Chr20: 1392950- | GCCACUACUCACCGUCU | 6697 |
| | | | 1392972 | CCU | |
| CR002090 | FKBP1A | + | Chr20: 1392949- | CGCCACUACUCACCGUC | 6698 |
| | | | 1392971 | UCC | |
| CR002091 | FKBP1A | − | Chr20: 1392880- | UGCCCGUCUCUGUCUCC | 6699 |
| | | | 1392902 | UCA | |
| CR002092 | FKBP1A | − | Chr20: 1392860- | GGGCGCACCUUCCCCAA | 6700 |
| | | | 1392882 | GCG | |
| CR002093 | FKBP1A | + | Chr20: 1392853- | GGUCUGGCCGCGCUUGG | 6701 |
| | | | 1392875 | GGA | |
| CR002094 | FKBP1A | + | Chr20: 1392849- | CGCAGGUCUGGCCGCGC | 6702 |
| | | | 1392871 | UUG | |
| CR002095 | FKBP1A | + | Chr20: 1392848- | ACGCAGGUCUGGCCGCG | 6703 |
| | | | 1392870 | CUU | |
| CR002096 | FKBP1A | + | Chr20: 1392847- | CACGCAGGUCUGGCCGC | 6704 |
| | | | 1392869 | GCU | |
| CR002097 | FKBP1A | − | Chr20: 1392846- | CAAGCGCGGCCAGACCU | 6705 |
| | | | 1392868 | GCG | |
| CR002098 | FKBP1A | + | Chr20: 1392837- | UGUAGUGCACCACGCAG | 6706 |
| | | | 1392859 | GUC | |
| CR002099 | FKBP1A | + | Chr20: 1392832- | ACCGGUGUAGUGCACCA | 6707 |
| | | | 1392854 | CGC | |
| CR002100 | FKBP1A | + | Chr20: 1392814- | CCGCUGGGCCCCCGACU | 6708 |
| | | | 1392836 | CAC | |
| CR002101 | FKBP1A | − | Chr20: 1375602- | UUACAGUCGUCUUUUUC | 6709 |
| | | | 1375624 | ACA | |
| CR002102 | FKBP1A | − | Chr20: 1375588- | UUCACAGGGAUGCUUGA | 6710 |
| | | | 1375610 | AGA | |
| CR002103 | FKBP1A | − | Chr20: 1375566- | GAAAGAAAUUUGAUUCC | 6711 |
| | | | 1375588 | UCC | |
| CR002104 | FKBP1A | − | Chr20: 1375565- | AAAGAAAUUUGAUUCCU | 6712 |
| | | | 1375587 | CCC | |
| CR002105 | FKBP1A | + | Chr20: 1375551- | GGGCUUGUUUCUGUCCC | 6713 |
| | | | 1375573 | GGG | |
| CR002106 | FKBP1A | + | Chr20: 1375548- | AAAGGGCUUGUUUCUGU | 6714 |
| | | | 1375570 | CCC | |
| CR002107 | FKBP1A | + | Chr20: 1375547- | UAAAGGGCUUGUUUCUG | 6715 |
| | | | 1375569 | UCC | |
| CR002108 | FKBP1A | − | Chr20: 1375534- | AAGCCCUUUAAGUUUAU | 6716 |
| | | | 1375556 | GCU | |
| CR002109 | FKBP1A | + | Chr20: 1375531- | UUGCCUAGCAUAAACUU | 6717 |
| | | | 1375553 | AAA | |
| CR002110 | FKBP1A | + | Chr20: 1375530- | CUUGCCUAGCAUAAACU | 6718 |
| | | | 1375552 | UAA | |
| CR002111 | FKBP1A | − | Chr20: 1375526- | UAAGUUUAUGCUAGGCA | 6719 |
| | | | 1375548 | AGC | |
| CR002112 | FKBP1A | − | Chr20: 1375523- | GUUUAUGCUAGGCAAGC | 6720 |
| | | | 1375545 | AGG | |
| CR002113 | FKBP1A | − | Chr20: 1375513- | GGCAAGCAGGAGGUGAU | 6721 |
| | | | 1375535 | CCG | |
| CR002114 | FKBP1A | − | Chr20: 1375509- | AGCAGGAGGUGAUCCGA | 6722 |
| | | | 1375531 | GGC | |
| CR002115 | FKBP1A | − | Chr20: 1375508- | GCAGGAGGUGAUCCGAG | 6723 |
| | | | 1375530 | GCU | |
| CR002116 | FKBP1A | − | Chr20: 1375501- | GUGAUCCGAGGCUGGGA | 6724 |
| | | | 1375523 | AGA | |
| CR002117 | FKBP1A | − | Chr20: 1375500- | UGAUCCGAGGCUGGGAA | 6725 |
| | | | 1375522 | GAA | |
| CR002118 | FKBP1A | − | Chr20: 1375499- | GAUCCGAGGCUGGGAAG | 6726 |
| | | | 1375521 | AAG | |
| CR002119 | FKBP1A | + | Chr20: 1375496- | CAACCCCUUCUUCCCAG | 6727 |
| | | | 1375518 | CCU | |
| CR002120 | FKBP1A | + | Chr20: 1375473- | ACAAAUGAGAGAGCAUA | 6728 |
| | | | 1375495 | CCU | |
| CR002121 | FKBP1A | + | Chr20: 1375472- | AACAAAUGAGAGAGCAU | 6729 |
| | | | 1375494 | ACC | |
| CR002122 | FKBP1A | − | Chr20: 1372231- | GUUCUUUUCACAGAUGA | 6730 |
| | | | 1372253 | GUG | |
| CR002123 | FKBP1A | − | Chr20: 1372230- | UUCUUUUCACAGAUGAG | 6731 |
| | | | 1372252 | UGU | |
| CR002124 | FKBP1A | + | Chr20: 1372199- | AUCUGGAGAUAUAGUCA | 6732 |
| | | | 1372221 | GUU | |
| CR002125 | FKBP1A | − | Chr20: 1372188- | AUAUCUCCAGAUUAUGC | 6733 |
| | | | 1372210 | CUA | |
| CR002126 | FKBP1A | + | Chr20: 1372182- | GUGGCACCAUAGGCAUA | 6734 |
| | | | 1372204 | AUC | |
| CR002127 | FKBP1A | − | Chr20: 1372179- | GAUUAUGCCUAUGGUGC | 6735 |
| | | | 1372201 | CAC | |
| CR002128 | FKBP1A | − | Chr20: 1372178- | AUUAUGCCUAUGGUGCC | 6736 |
| | | | 1372200 | ACU | |
| CR002129 | FKBP1A | + | Chr20: 1372172- | UGGGUGCCCAGUGGCAC | 6737 |
| | | | 1372194 | CAU | |
| CR002130 | FKBP1A | − | Chr20: 1372170- | UAUGGUGCCACUGGGCA | 6738 |
| | | | 1372192 | CCC | |
| CR002131 | FKBP1A | + | Chr20: 1372163- | GAUGAUGCCUGGGUGCC | 6739 |
| | | | 1372185 | CAG | |
| CR002132 | FKBP1A | + | Chr20: 1372153- | CAUGUGGUGGGAUGAUG | 6740 |
| | | | 1372175 | CCU | |
| CR002133 | FKBP1A | + | Chr20: 1372152- | GCAUGUGGUGGGAUGAU | 6741 |
| | | | 1372174 | GCC | |
| CR002134 | FKBP1A | + | Chr20: 1372141- | AGACGAGAGUGGCAUGU | 6742 |
| | | | 1372163 | GGU | |
| CR002135 | FKBP1A | + | Chr20: 1372140- | AAGACGAGAGUGGCAUG | 6743 |
| | | | 1372162 | UGG | |
| CR002136 | FKBP1A | + | Chr20: 1372137- | UCGAAGACGAGAGUGGC | 6744 |
| | | | 1372159 | AUG | |
| CR002137 | FKBP1A | − | Chr20: 1372132- | UGCCACUCUCGUCUUCG | 6745 |
| | | | 1372154 | AUG | |
| CR002138 | FKBP1A | + | Chr20: 1372130- | CUCCACAUCGAAGACGA | 6746 |
| | | | 1372152 | GAG | |
| CR002139 | FKBP1A | − | Chr20: 1372117- | CGAUGUGGAGCUUCUAA | 6747 |
| | | | 1372139 | AAC | |
| CR002140 | FKBP1A | − | Chr20: 1372108- | GCUUCUAAAACUGGAAU | 6748 |
| | | | 1372130 | GAC | |
| CR002141 | FKBP1A | − | Chr20: 1372103- | UAAAACUGGAAUGACAG | 6749 |
| | | | 1372125 | GAA | |

[0699] In the various aspects of the invention, the gRNA molecule may include a targeting domain listed above. In an embodiment, the targeting domain of the gRNA of the invention comprises, e.g. consists of, the targeting domain of CR002100. In an embodiment, the targeting domain of the gRNA of the invention comprises, e.g. consists of, the targeting domain of CR002097. In an embodiment, the targeting domain of the gRNA of the invention comprises, e.g. consists of, the targeting domain of CR002091. In an embodiment, the targeting domain of the gRNA of the invention comprises, e.g. consists of, the targeting domain of CR002085. In an embodiment, the targeting domain of the gRNA of the invention comprises, e.g. consists of, the targeting domain of CR002086. In an embodiment, the targeting domain of the gRNA of the invention comprises, e.g. consists of, the targeting domain of CR002089. In an embodiment, the targeting domain of the gRNA of the invention comprises, e.g. consists of, the targeting domain of CR002088. In an embodiment, the targeting domain of the gRNA of the invention comprises, e.g. consists of, the targeting domain of CR002095. In an embodiment, the targeting domain of the gRNA of the invention comprises, e.g. consists of, the targeting domain of CR002096. In an embodiment, the targeting domain of the gRNA of the invention comprises, e.g. consists of, the targeting domain of CR002080. In an embodiment, the targeting domain of the gRNA of the invention comprises, e.g. consists of, the targeting domain of CR002109. In an embodiment, the targeting domain of the gRNA of the invention comprises, e.g. consists of, the targeting domain of CR002112. In an embodiment, the targeting domain of the gRNA of the invention comprises, e.g. consists of, the targeting domain of CR002110. In an embodiment, the targeting domain of the gRNA of the invention comprises, e.g. consists of, the targeting domain of CR002108. In an embodiment, the targeting domain of the gRNA of the invention comprises, e.g. consists of, the targeting domain of CR002104. In an embodiment, the targeting domain of the gRNA of the invention comprises, e.g. consists of, the targeting domain of CR002115. In an embodiment, the targeting domain of the gRNA of the invention comprises, e.g. consists of, the targeting domain of CR002116. In an embodiment, the targeting domain of the gRNA of the invention comprises, e.g. consists of, the targeting domain of CR002087. In an embodiment, the targeting domain of the gRNA of the invention comprises, e.g. consists of, the targeting domain of CR002107. In an embodiment, the targeting domain of the gRNA of the invention comprises, e.g. consists of, the targeting domain of CR002113. Such gRNA molecules, including combinations thereof, are suitable for use in, for example, the CRISPR systems, methods and cells and other aspects of the invention described herein.

TABLE 6c
gRNA Targeting Domains for human CIITA

| | | | Chromosomal | gRNA targeting domain | SEQ ID |
|---|---|---|---|---|---|
| Id. | Target | Strand | location | sequence | NO: |
| CR002939 | CIITA | + | Chr16: 10877252- | GGCAUCCUUGGGGAAG | 7717 |
| | | | 10877274 | CUGA | |
| CR002940 | CIITA | − | Chr16: 10877257- | UCGUGCCCUCAGCUUC | 7718 |
| | | | 10877279 | CCCA | |
| CR002941 | CIITA | + | Chr16: 10877259- | UUGGGGAAGCUGAGGG | 7719 |
| | | | 10877281 | CACG | |
| CR002942 | CIITA | + | Chr16: 10877262- | GGGAAGCUGAGGGCAC | 7720 |
| | | | 10877284 | GAGG | |
| CR002943 | CIITA | + | Chr16: 10877263- | GGAAGCUGAGGGCACG | 7721 |
| | | | 10877285 | AGGA | |
| CR002944 | CIITA | + | Chr16: 10877264- | GAAGCUGAGGGCACGA | 7722 |
| | | | 10877286 | GGAG | |
| CR002945 | CIITA | + | Chr16: 10877278- | GAGGAGGGGCUGCCAG | 7723 |
| | | | 10877300 | ACUC | |
| CR002946 | CIITA | + | Chr16: 10877279- | AGGAGGGGCUGCCAGA | 7724 |
| | | | 10877301 | CUCC | |
| CR002947 | CIITA | − | Chr16: 10877290- | AGGCAGCAGCUCCCGG | 7725 |
| | | | 10877312 | AGUC | |
| CR002948 | CIITA | + | Chr16: 10877292- | AGACUCCGGGAGCUGC | 7726 |
| | | | 10877314 | UGCC | |
| CR002949 | CIITA | + | Chr16: 10877296- | UCCGGGAGCUGCUGCC | 7727 |
| | | | 10877318 | UGGC | |
| CR002950 | CIITA | + | Chr16: 10877297- | CCGGGAGCUGCUGCCU | 7728 |
| | | | 10877319 | GGCU | |
| CR002951 | CIITA | − | Chr16: 10877297- | CCCAGCCAGGCAGCAG | 7729 |
| | | | 10877319 | CUCC | |
| CR002952 | CIITA | − | Chr16: 10877310- | AUUGUGUAGGAAUCCC | 7730 |
| | | | 10877332 | AGCC | |
| CR002953 | CIITA | + | Chr16: 10877321- | UUCCUACACAAUGCGU | 7731 |
| | | | 10877343 | UGCC | |
| CR002954 | CIITA | − | Chr16: 10877323- | AGCCAGGCAACGCAUU | 7732 |
| | | | 10877345 | GUGU | |
| CR002955 | CIITA | + | Chr16: 10877337- | UGCCUGGCUCCACGCC | 7733 |
| | | | 10877359 | CUGC | |
| CR002956 | CIITA | + | Chr16: 10877338- | GCCUGGCUCCACGCCC | 7734 |
| | | | 10877360 | UGCU | |
| CR002957 | CIITA | − | Chr16: 10877339- | ACCCAGCAGGGCGUGG | 7735 |
| | | | 10877361 | AGCC | |
| CR002958 | CIITA | − | Chr16: 10877346- | AGGUAGGACCCAGCAG | 7736 |
| | | | 10877368 | GGCG | |
| CR002959 | CIITA | − | Chr16: 10877351- | CUGACAGGUAGGACCC | 7737 |
| | | | 10877373 | AGCA | |
| CR002960 | CIITA | − | Chr16: 10877352- | UCUGACAGGUAGGACC | 7738 |
| | | | 10877374 | CAGC | |
| CR002961 | CIITA | + | Chr16: 10895283- | CAGCUCACAGUGUGCC | 7739 |
| | | | 10895305 | ACCA | |
| CR002962 | CIITA | + | Chr16: 10895289- | ACAGUGUGCCACCAUG | 7740 |
| | | | 10895311 | GAGU | |
| CR002963 | CIITA | + | Chr16: 10895290- | CAGUGUGCCACCAUGG | 7741 |
| | | | 10895312 | AGUU | |
| CR002964 | CIITA | + | Chr16: 10895291- | AGUGUGCCACCAUGGA | 7742 |
| | | | 10895313 | GUUG | |
| CR002965 | CIITA | − | Chr16: 10895297- | UAGGGGCCCCAACUCC | 7743 |
| | | | 10895319 | AUGG | |
| CR002966 | CIITA | − | Chr16: 10895300- | UUCUAGGGGCCCCAAC | 7744 |
| | | | 10895322 | UCCA | |
| CR002967 | CIITA | + | Chr16: 10895302- | AUGGAGUUGGGGCCCC | 7745 |
| | | | 10895324 | UAGA | |
| CR002968 | CIITA | + | Chr16: 10895305- | GAGUUGGGGCCCCUAG | 7746 |
| | | | 10895327 | AAGG | |
| CR002969 | CIITA | + | Chr16: 10895313- | GCCCCUAGAAGGUGGC | 7747 |
| | | | 10895335 | UACC | |
| CR002970 | CIITA | − | Chr16: 10895314- | UCCAGGUAGCCACCUU | 7748 |
| | | | 10895336 | CUAG | |
| CR002971 | CIITA | − | Chr16: 10895315- | CUCCAGGUAGCCACCU | 7749 |
| | | | 10895337 | UCUA | |
| CR002972 | CIITA | − | Chr16: 10895316- | GCUCCAGGUAGCCACC | 7750 |
| | | | 10895338 | UUCU | |
| CR002973 | CIITA | − | Chr16: 10895331- | CAUCGCUGUUAAGAAG | 7751 |
| | | | 10895353 | CUCC | |
| CR002974 | CIITA | − | Chr16: 10895358- | AGAAGUGGUAGAGGCA | 7752 |
| | | | 10895380 | CAGG | |
| CR002975 | CIITA | − | Chr16: 10895359- | UAGAAGUGGUAGAGGC | 7753 |
| | | | 10895381 | ACAG | |
| CR002976 | CIITA | − | Chr16: 10895360- | AUAGAAGUGGUAGAGG | 7754 |
| | | | 10895382 | CACA | |
| CR002977 | CIITA | − | Chr16: 10895361- | CAUAGAAGUGGUAGAG | 7755 |
| | | | 10895383 | GCAC | |
| CR002978 | CIITA | − | Chr16: 10895367- | UCUGGUCAUAGAAGUG | 7756 |
| | | | 10895389 | GUAG | |
| CR002979 | CIITA | + | Chr16: 10895370- | CUACCACUUCUAUGAC | 7757 |
| | | | 10895392 | CAGA | |
| CR002980 | CIITA | − | Chr16: 10895373- | GGUCCAUCUGGUCAUA | 7758 |
| | | | 10895395 | GAAG | |
| CR002981 | CIITA | + | Chr16: 10895376- | CUUCUAUGACCAGAUG | 7759 |
| | | | 10895398 | GACC | |
| CR002982 | CIITA | + | Chr16: 10895380- | UAUGACCAGAUGGACC | 7760 |
| | | | 10895402 | UGGC | |
| CR002983 | CIITA | − | Chr16: 10895385- | CUUCUCCAGCCAGGUC | 7761 |
| | | | 10895407 | CAUC | |
| CR002984 | CIITA | − | Chr16: 10895394- | CAAUCUCUUCUUCUCC | 7762 |
| | | | 10895416 | AGCC | |
| CR002985 | CIITA | − | Chr16: 10895671- | CAGUUGAUGGUGUCUG | 7763 |
| | | | 10895693 | UGUC | |
| CR002986 | CIITA | − | Chr16: 10895672- | GCAGUUGAUGGUGUCU | 7764 |
| | | | 10895694 | GUGU | |
| CR002987 | CIITA | − | Chr16: 10895684- | GCUGAACUGGUCGCAG | 7765 |
| | | | 10895706 | UUGA | |
| CR002988 | CIITA | + | Chr16: 10895687- | UCAACUGCGACCAGUU | 7766 |
| | | | 10895709 | CAGC | |
| CR002989 | CIITA | − | Chr16: 10895697- | CACACAACAGCCUGCU | 7767 |
| | | | 10895719 | GAAC | |
| CR002990 | CIITA | + | Chr16: 10895703- | CAGCAGGCUGUUGUGU | 7768 |
| | | | 10895725 | GACA | |
| CR002991 | CIITA | + | Chr16: 10895707- | AGGCUGUUGUGUGACA | 7769 |
| | | | 10895729 | UGGA | |
| CR002992 | CIITA | + | Chr16: 10895723- | UGGAAGGUGAUGAAGA | 7770 |
| | | | 10895745 | GACC | |
| CR002993 | CIITA | + | Chr16: 10895724- | GGAAGGUGAUGAAGAG | 7771 |
| | | | 10895746 | ACCA | |
| CR002994 | CIITA | + | Chr16: 10895727- | AGGUGAUGAAGAGACC | 7772 |
| | | | 10895749 | AGGG | |
| CR002995 | CIITA | − | Chr16: 10895741- | GAUAUUGGCAUAAGCC | 7773 |
| | | | 10895763 | UCCC | |
| CR002996 | CIITA | | Chr16: 10895756- | AGGUGCUUCCUCACCG | 7774 |
| | | | 10895778 | AUAU | |
| CR002997 | CIITA | + | Chr16: 10898674- | ACUGGACCAGUAUGUC | 7775 |
| | | | 10898696 | UUCC | |
| CR002998 | CIITA | − | Chr16: 10898680- | GGGAGUCCUGGAAGAC | 7776 |
| | | | 10898702 | AUAC | |
| CR002999 | CIITA | + | Chr16: 10898686- | UGUCUUCCAGGACUCC | 7777 |
| | | | 10898708 | CAGC | |
| CR003000 | CIITA | + | Chr16: 10898689- | CUUCCAGGACUCCCAG | 7778 |
| | | | 10898711 | CUGG | |
| CR003001 | CIITA | + | Chr16: 10898690- | UUCCAGGACUCCCAGC | 7779 |
| | | | 10898712 | UGGA | |
| CR003002 | CIITA | − | Chr16: 10898692- | GGCCCUCCAGCUGGGA | 7780 |
| | | | 10898714 | GUCC | |
| CR003003 | CIITA | − | Chr16: 10898700- | CUUGCUCAGGCCCUCC | 7781 |
| | | | 10898722 | AGCU | |
| CR003004 | CIITA | − | Chr16: 10898701- | CCUUGCUCAGGCCCUC | 7782 |
| | | | 10898723 | CAGC | |
| CR003005 | CIITA | + | Chr16: 10898701- | CCAGCUGGAGGGCCUG | 7783 |
| | | | 10898723 | AGCA | |
| CR003006 | CIITA | − | Chr16: 10898713- | UACUGAAAAUGUCCUU | 7784 |
| | | | 10898735 | GCUC | |
| CR003007 | CIITA | + | Chr16: 10898930- | AUAGGACCAGAUGAAG | 7785 |
| | | | 10898952 | UGAU | |
| CR003008 | CIITA | − | Chr16: 10898936- | CUCUCACCGAUCACUU | 7786 |
| | | | 10898958 | CAUC | |
| CR003009 | CIITA | + | Chr16: 10898941- | UGAAGUGAUCGGUGAG | 7787 |
| | | | 10898963 | AGUA | |
| CR003010 | CIITA | + | Chr16: 10898960- | AUGGAGAUGCCAGCAG | 7788 |
| | | | 10898982 | AAGU | |
| CR003011 | CIITA | + | Chr16: 10898961- | UGGAGAUGCCAGCAGA | 7789 |
| | | | 10898983 | AGUU | |
| CR003012 | CIITA | − | Chr16: 10898969- | CUUUUCUGCCCAACUU | 7790 |
| | | | 10898991 | CUGC | |
| CR003013 | CIITA | − | Chr16: 10901514- | UGCCGGAAGCUCCUCU | 7791 |
| | | | 10901536 | GGGA | |
| CR003014 | CIITA | − | Chr16: 10901518- | GGUCUGCCGGAAGCUC | 7792 |
| | | | 10901540 | CUCU | |
| CR003015 | CIITA | − | Chr16: 10901519- | AGGUCUGCCGGAAGCU | 7793 |
| | | | 10901541 | CCUC | |
| CR003016 | CIITA | + | Chr16: 10901529- | UUCCGGCAGACCUGAA | 7794 |
| | | | 10901551 | GCAC | |
| CR003017 | CIITA | − | Chr16: 10901531- | UUCCAGUGCUUCAGGU | 7795 |
| | | | 10901553 | CUGC | |
| CR003018 | CIITA | + | Chr16: 10902040- | GAGCCCCCCACUGUGG | 7796 |
| | | | 10902062 | UGAC | |
| CR003019 | CIITA | − | Chr16: 10902043- | CUGCCAGUCACCACAG | 7797 |
| | | | 10902065 | UGGG | |
| CR003020 | CIITA | − | Chr16: 10902044- | ACUGCCAGUCACCACA | 7798 |
| | | | 10902066 | GUGG | |
| CR003021 | CIITA | − | Chr16: 10902045- | GACUGCCAGUCACCAC | 7799 |
| | | | 10902067 | AGUG | |
| CR003022 | CIITA | − | Chr16: 10902046- | AGACUGCCAGUCACCA | 7800 |
| | | | 10902068 | CAGU | |
| CR003023 | CIITA | − | Chr16: 10902047- | GAGACUGCCAGUCACC | 7801 |
| | | | 10902069 | ACAG | |
| CR003024 | CIITA | + | Chr16: 10902054- | GGUGACUGGCAGUCUC | 7802 |
| | | | 10902076 | CUAG | |
| CR003025 | CIITA | + | Chr16: 10902055- | GUGACUGGCAGUCUCC | 7803 |
| | | | 10902077 | UAGU | |
| CR003026 | CIITA | − | Chr16: 10902069- | AGUCGCUCACUGGUCC | 7804 |
| | | | 10902091 | CACU | |

[0700] In the various aspects of the invention, the gRNA molecule may include a targeting domain listed above. In an embodiment, the targeting domain of the gRNA of the invention comprises, e.g. consists of, the targeting domain of CR002939. In an embodiment, the targeting domain of the gRNA of the invention comprises, e.g. consists of, the targeting domain of CR002940. In an embodiment, the targeting domain of the gRNA of the invention comprises, e.g. consists of, the targeting domain of CR002941. In an embodiment, the targeting domain of the gRNA of the invention comprises, e.g. consists of, the targeting domain of CR002942. In an embodiment, the targeting domain of the gRNA of the invention comprises, e.g. consists of, the targeting domain of CR002943. In an embodiment, the targeting domain of the gRNA of the invention comprises, e.g. consists of, the targeting domain of CR002944. In an embodiment, the targeting domain of the gRNA of the invention comprises, e.g. consists of, the targeting domain of CR002945. In an embodiment, the targeting domain of the gRNA of the invention comprises, e.g. consists of, the targeting domain of CR002946. In an embodiment, the targeting domain of the gRNA of the invention comprises, e.g. consists of, the targeting domain of CR002947. In an embodiment, the targeting domain of the gRNA of the invention comprises, e.g. consists of, the targeting domain of CR002948. In an embodiment, the targeting domain of the gRNA of the invention comprises, e.g. consists of, the targeting domain of CR002949. In an embodiment, the targeting domain of the gRNA of the invention comprises, e.g. consists of, the targeting domain of CR002950. In an embodiment, the targeting domain of the gRNA of the invention comprises, e.g. consists of, the targeting domain of CR002951. In an embodiment, the targeting domain of the gRNA of the invention comprises, e.g. consists of, the targeting domain of CR002952. In an embodiment, the targeting domain of the gRNA of the invention comprises, e.g. consists of, the targeting domain of CR002953. In an embodiment, the targeting domain of the gRNA of the invention comprises, e.g. consists of, the targeting domain of CR002954. In an embodiment, the targeting domain of the gRNA of the invention comprises, e.g. consists of, the targeting domain of CR002955. In an embodiment, the targeting domain of the gRNA of the invention comprises, e.g. consists of, the targeting domain of CR002956. In an embodiment, the targeting domain of the gRNA of the invention comprises, e.g. consists of, the targeting domain of CR002957. In an embodiment, the targeting domain of the gRNA of the invention comprises, e.g. consists of, the targeting domain of CR002958. In an embodiment, the targeting domain of the gRNA of the invention comprises, e.g. consists of, the targeting domain of CR002959. In an embodiment, the targeting domain of the gRNA of the invention comprises, e.g. consists of, the targeting domain of CR002960. In an embodiment, the targeting domain of the gRNA of the invention comprises, e.g. consists of, the targeting domain of CR002961. In an embodiment, the targeting domain of the gRNA of the invention comprises, e.g. consists of, the targeting domain of CR002962. In an embodiment, the targeting domain of the gRNA of the invention comprises, e.g. consists of, the targeting domain of CR002963. In an embodiment, the targeting domain of the gRNA of the invention comprises, e.g. consists of, the targeting domain of CR002964. In an embodiment, the targeting domain of the gRNA of the invention comprises, e.g. consists of, the targeting domain of CR002965. In an embodiment, the targeting domain of the gRNA of the invention comprises, e.g. consists of, the targeting domain of CR002966. In an embodiment, the targeting domain of the gRNA of the invention comprises, e.g. consists of, the targeting domain of CR002967. In an embodiment, the targeting domain of the gRNA of the invention comprises, e.g. consists of, the targeting domain of CR002968. In an embodiment, the targeting domain of the gRNA of the invention comprises, e.g. consists of, the targeting domain of CR002969. In an embodiment, the targeting domain of the gRNA of the invention comprises, e.g. consists of, the targeting domain of CR002970. In an embodiment, the targeting domain of the gRNA of the invention comprises, e.g. consists of, the targeting domain of CR002971. In an embodiment, the targeting domain of the gRNA of the invention comprises, e.g. consists of, the targeting domain of CR002972. In an embodiment, the targeting domain of the gRNA of the invention comprises, e.g. consists of, the targeting domain of CR002973. In an embodiment, the targeting domain of the gRNA of the invention comprises, e.g. consists of, the targeting domain of CR002974. In an embodiment, the targeting domain of the gRNA of the invention comprises, e.g. consists of, the targeting domain of CR002975. In an embodiment, the targeting domain of the gRNA of the invention comprises, e.g. consists of, the targeting domain of CR002976. In an embodiment, the targeting domain of the gRNA of the invention comprises, e.g. consists of, the targeting domain of CR002977. In an embodiment, the targeting domain of the gRNA of the invention comprises, e.g. consists of, the targeting domain of CR002978. In an embodiment, the targeting domain of the gRNA of the invention comprises, e.g. consists of, the targeting domain of CR002979. In an embodiment, the targeting domain of the gRNA of the invention comprises, e.g. consists of, the targeting domain of CR002980. In an embodiment, the targeting domain of the gRNA of the invention comprises, e.g. consists of, the targeting domain of CR002981. In an embodiment, the targeting domain of the gRNA of the invention comprises, e.g. consists of, the targeting domain of CR002982. In an embodiment, the targeting domain of the gRNA of the invention comprises, e.g. consists of, the targeting domain of CR002983. In an embodiment, the targeting domain of the gRNA of the invention comprises, e.g. consists of, the targeting domain of CR002984. In an embodiment, the targeting domain of the gRNA of the invention comprises, e.g. consists of, the targeting domain of CR002985. In an embodiment, the targeting domain of the gRNA of the invention comprises, e.g. consists of, the targeting domain of CR002986. In an embodiment, the targeting domain of the gRNA of the invention comprises, e.g. consists of, the targeting domain of CR002987. In an embodiment, the targeting domain of the gRNA of the invention comprises, e.g. consists of, the targeting domain of CR002988. In an embodiment, the targeting domain of the gRNA of the invention comprises, e.g. consists of, the targeting domain of CR002989. In an embodiment, the targeting domain of the gRNA of the invention comprises, e.g. consists of, the targeting domain of CR002990. In an embodiment, the targeting domain of the gRNA of the invention comprises, e.g. consists of, the targeting domain of CR002991. In an embodiment, the targeting domain of the gRNA of the invention comprises, e.g. consists of, the targeting domain of CR002992. In an embodiment, the targeting domain of the gRNA of the invention comprises, e.g. consists of, the targeting domain of CR002993. In an embodiment, the targeting domain of the gRNA of the invention comprises, e.g. consists of, the targeting domain of CR002994. In an embodiment, the targeting domain of the gRNA of the invention comprises, e.g. consists of, the targeting domain of CR002995. In an embodiment, the targeting domain of the gRNA of the invention comprises, e.g. consists of, the targeting domain of CR002996. In an embodiment, the targeting domain of the gRNA of the invention comprises, e.g. consists of, the targeting domain of CR002997. In an embodiment, the targeting domain of the gRNA of the invention comprises, e.g. consists of, the targeting domain of CR002998. In an embodiment, the targeting domain of the gRNA of the invention comprises, e.g. consists of, the targeting domain of CR002999. In an embodiment, the targeting domain of the gRNA of the invention comprises, e.g. consists of, the targeting domain of CR003000. In an embodiment, the targeting domain of the gRNA of the invention comprises, e.g. consists of, the targeting domain of CR003001. In an embodiment, the targeting domain of the gRNA of the invention comprises, e.g. consists of, the targeting domain of CR003002. In an embodiment, the targeting domain of the gRNA of the invention comprises, e.g. consists of, the targeting domain of CR003003. In an embodiment, the targeting domain of the gRNA of the invention comprises, e.g. consists of, the targeting domain of CR003004. In an embodiment, the targeting domain of the gRNA of the invention comprises, e.g. consists of, the targeting domain of CR003005. In an embodiment, the targeting domain of the gRNA of the invention comprises, e.g. consists of, the targeting domain of CR003006. In an embodiment, the targeting domain of the gRNA of the invention comprises, e.g. consists of, the targeting domain of CR003007. In an embodiment, the targeting domain of the gRNA of the invention comprises, e.g. consists of, the targeting domain of CR003008. In an embodiment, the targeting domain of the gRNA of the invention comprises, e.g. consists of, the targeting domain of CR003009. In an embodiment, the targeting domain of the gRNA of the invention comprises, e.g. consists of, the targeting domain of CR003010. In an embodiment, the targeting domain of the gRNA of the invention comprises, e.g. consists of, the targeting domain of CR003011. In an embodiment, the targeting domain of the gRNA of the invention comprises, e.g. consists of, the targeting domain of CR003012. In an embodiment, the targeting domain of the gRNA of the invention comprises, e.g. consists of, the targeting domain of CR003013. In an embodiment, the targeting domain of the gRNA of the invention comprises, e.g. consists of, the targeting domain of CR003014. In an embodiment, the targeting domain of the gRNA of the invention comprises, e.g. consists of, the targeting domain of CR003015. In an embodiment, the targeting domain of the gRNA of the invention comprises, e.g. consists of, the targeting domain of CR003016. In an embodiment, the targeting domain of the gRNA of the invention comprises, e.g. consists of, the targeting domain of CR003017. In an embodiment, the targeting domain of the gRNA of the invention comprises, e.g. consists of, the targeting domain of CR003018. In an embodiment, the targeting domain of the gRNA of the invention comprises, e.g. consists of, the targeting domain of CR003019. In an embodiment, the targeting domain of the gRNA of the invention comprises, e.g. consists of, the targeting domain of CR003020. In an embodiment, the targeting domain of the gRNA of the invention comprises, e.g. consists of, the targeting domain of CR003021. In an embodiment, the targeting domain of the gRNA of the invention comprises, e.g. consists of, the targeting domain of CR003022. In an embodiment, the targeting domain of the gRNA of the invention comprises, e.g. consists of, the targeting domain of CR003023. In an embodiment, the targeting domain of the gRNA of the invention comprises, e.g. consists of, the targeting domain of CR003024. In an embodiment, the targeting domain of the gRNA of the invention comprises, e.g. consists of, the targeting domain of CR003025. In an embodiment, the targeting domain of the gRNA of the invention comprises, e.g. consists of, the targeting domain of CR003026. Such gRNA molecules, and combinations thereof, are suitable for use in, for example, the CRISPR systems, methods and cells and other aspects of the invention described herein.

TABLE 6d
Targeting Domains for human LILRB1, an exemplary target of an NK inhibitory molecule.

| | | | | Chromosomal | gRNA targeting domain | SEQ ID |
|---|---|---|---|---|---|---|
| Id. | Target | Region | Strand | location | sequence | NO: |
| 10859_ | LILRB1 | EXON | + | chr19: 54630390- | UAAAAAGGGGAAGUUA | 10090 |
| 2_1 | | | | 54630410 | AGAG | |
| 10859_ | LILRB1 | EXON | + | chr19: 54630399- | GAAGUUAAGAGGGGAC | 10091 |
| 2_2 | | | | 54630419 | UAUU | |
| 10859_ | LILRB1 | EXON | + | chr19: 54630503- | CUGCCACACGCAGCUCA | 10092 |
| 2_23 | | | | 54630523 | GCC | |
| 10859_ | LILRB1 | EXON | + | chr19: 54630504- | UGCCACACGCAGCUCAG | 10093 |
| 2_24 | | | | 54630524 | CCU | |
| 10859_ | LILRB1 | EXON | + | chr19: 54630507- | CACACGCAGCUCAGCCU | 10094 |
| 2_25 | | | | 54630527 | GGG | |
| 10859_ | LILRB1 | EXON | + | chr19: 54630560- | AUCUGAGUCUGCCUGCA | 10095 |
| 2_29 | | | | 54630580 | GCA | |
| 10859_ | LILRB1 | EXON | + | chr19: 54630566- | GUCUGCCUGCAGCAUGG | 10096 |
| 2_31 | | | | 54630586 | ACC | |
| 10859_ | LILRB1 | EXON | + | chr19: 54630567- | UCUGCCUGCAGCAUGGA | 10097 |
| 2_32 | | | | 54630587 | CCU | |
| 10859_ | LILRB1 | EXON | + | chr19: 54630589- | GUCUUCCCUGAAGCAUC | 10098 |
| 2_35 | | | | 54630609 | UCC | |
| 10859_ | LILRB1 | EXON | + | chr19: 54630590- | UCUUCCCUGAAGCAUCU | 10099 |
| 2_36 | | | | 54630610 | CCA | |
| 10859_ | LILRB1 | EXON | + | chr19: 54630594- | CCCUGAAGCAUCUCCAG | 10100 |
| 2_39 | | | | 54630614 | GGC | |
| 10859_ | LILRB1 | EXON | + | chr19: 54630597- | UGAAGCAUCUCCAGGGC | 10101 |
| 2_42 | | | | 54630617 | UGG | |
| 10859_ | LILRB1 | EXON | + | chr19: 54630598- | GAAGCAUCUCCAGGGCU | 10102 |
| 2_44 | | | | 54630618 | GGA | |
| 10859_ | LILRB1 | EXON | + | chr19: 54630611- | GGCUGGAGGGACGACU | 10103 |
| 2_45 | | | | 54630631 | GCCA | |
| 10859_ | LILRB1 | EXON | + | chr19: 54630616- | GAGGGACGACUGCCAUG | 10104 |
| 2_47 | | | | 54630636 | GUA | |
| 10859_ | LILRB1 | EXON | − | chr19: 54630436- | CUUUCUUGACACUGGAU | 10105 |
| 2_58 | | | | 54630456 | UGU | |
| 10859_ | LILRB1 | EXON | − | chr19: 54630437- | UCUUUCUUGACACUGGA | 10106 |
| 2_60 | | | | 54630457 | UUG | |
| 10859_ | LILRB1 | EXON | − | chr19: 54630444- | GUUGACUUCUUUCUUG | 10107 |
| 2_62 | | | | 54630464 | ACAC | |
| 10859_ | LILRB1 | EXON | − | chr19: 54630474- | AAGAGAAAUGCAGGGA | 10108 |
| 2_65 | | | | 54630494 | AAUA | |
| 10859_ | LILRB1 | EXON | − | chr19: 54630475- | GAAGAGAAAUGCAGGG | 10109 |
| 2_67 | | | | 54630495 | AAAU | |
| 10859_ | LILRB1 | EXON | − | chr19: 54630482- | GAGCACAGAAGAGAAA | 10110 |
| 2_70 | | | | 54630502 | UGCA | |
| 10859_ | LILRB1 | EXON | − | chr19: 54630483- | UGAGCACAGAAGAGAA | 10111 |
| 2_72 | | | | 54630503 | AUGC | |
| 10859_ | LILRB1 | EXON | − | chr19: 54630509- | CGCCCAGGCUGAGCUGC | 10112 |
| 2_80 | | | | 54630529 | GUG | |
| 10859_ | LILRB1 | EXON | − | chr19: 54630524- | CGCAUCUGGCUGUGCCG | 10113 |
| 2_82 | | | | 54630544 | CCC | |
| 10859_ | LILRB1 | EXON | − | chr19: 54630538- | GCAGAGACGCAUCUCGC | 10114 |
| 2_83 | | | | 54630558 | AUC | |
| 10859_ | LILRB1 | EXON | − | chr19: 54630574- | AAGACCCAGGUCCAUGC | 10115 |
| 2_85 | | | | 54630594 | UGC | |
| 10859_ | LILRB1 | EXON | − | chr19: 54630587- | AGAUGCUUCAGGGAAG | 10116 |
| 2_87 | | | | 54630607 | ACCC | |
| 10859_ | LILRB1 | EXON | − | chr19: 54630597- | CCAGCCCUGGAGAUGCU | 10117 |
| 2_88 | | | | 54630617 | UCA | |
| 10859_ | LILRB1 | EXON | − | chr19: 54630598- | UCCAGCCCUGGAGAUGC | 10118 |
| 2_90 | | | | 54630618 | UUC | |
| 10859_ | LILRB1 | EXON | − | chr19: 54630610- | GGCAGUCGUCCCUCCAG | 10119 |
| 2_94 | | | | 54630630 | CCC | |
| 10859_ | LILRB1 | EXON | − | chr19: 54630631- | GUGUUGUGGGGUCCUU | 10120 |
| 2_98 | | | | 54630651 | ACCA | |
| 10859_ | LILRB1 | EXON | + | chr19: 54631010- | UCUCUAUCCUGCCAGCA | 10121 |
| 3_3 | | | | 54631030 | CCG | |
| 10859_ | LILRB1 | EXON | + | chr19: 54631011- | CUCUAUCCUGCCAGCAC | 10122 |
| 3_4 | | | | 54631031 | CGA | |
| 10859_ | LILRB1 | EXON | + | chr19: 54631032- | GGCUCAUCCAUCCACAG | 10123 |
| 3_7 | | | | 54631052 | AGC | |
| 10859_ | LILRB1 | EXON | + | chr19: 54631033- | GCUCAUCCAUCCACAGA | 10124 |
| 3_8 | | | | 54631053 | GCA | |
| 10859_ | LILRB1 | EXON | + | chr19: 54631039- | CCAUCCACAGAGCAGGG | 10125 |
| 3_10 | | | | 54631059 | CAG | |
| 10859_ | LILRB1 | EXON | + | chr19: 54631040- | CAUCCACAGAGCAGGGC | 10126 |
| 3_12 | | | | 54631060 | AGU | |
| 10859_ | LILRB1 | EXON | + | chr19: 54631043- | CCACAGAGCAGGGCAGU | 10127 |
| 3_15 | | | | 54631063 | GGG | |
| 10859_ | LILRB1 | EXON | + | chr19: 54631069- | CGCCAUGACCCCCAUCC | 10128 |
| 3_17 | | | | 54631089 | UCA | |
| 10859_ | LILRB1 | EXON | + | chr19: 54631085- | CUCACGGUCCUGAUCUG | 10129 |
| 3_18 | | | | 54631105 | UCU | |
| 10859_ | LILRB1 | EXON | + | chr19: 54631101- | GUCUCGGUGAGAUUUG | 10130 |
| 3_24 | | | | 54631121 | AAGA | |
| 10859_ | LILRB1 | EXON | + | chr19: 54631104- | UCGGUGAGAUUUGAAG | 10131 |
| 3_25 | | | | 54631124 | AAGG | |
| 10859_ | LILRB1 | EXON | − | chr19: 54631020- | GAUGAGCCCUCGGUGCU | 10132 |
| 3_28 | | | | 54631040 | GGC | |
| 10859_ | LILRB1 | EXON | − | chr19: 54631024- | GAUGGAUGAGCCCUCGG | 10133 |
| 3_30 | | | | 54631044 | UGC | |
| 10859_ | LILRB1 | EXON | − | chr19: 54631030- | UCUGUGGAUGGAUGAG | 10134 |
| 3_31 | | | | 54631050 | CCCU | |
| 10859_ | LILRB1 | EXON | − | chr19: 54631042- | CCACUGCCCUGCUCUGU | 10135 |
| 3_33 | | | | 54631062 | GGA | |
| 10859_ | LILRB1 | EXON | − | chr19: 54631046- | CCUCCCACUGCCCUGCU | 10136 |
| 3_35 | | | | 54631066 | CUG | |
| 10859_ | LILRB1 | EXON | − | chr19: 54631074- | GACCGUGAGGAUGGGG | 10137 |
| 3_37 | | | | 54631094 | GUCA | |
| 10859_ | LILRB1 | EXON | − | chr19: 54631080- | GAUCAGGACCGUGAGG | 10138 |
| 3_38 | | | | 54631100 | AUGG | |
| 10859_ | LILRB1 | EXON | − | chr19: 54631081- | AGAUCAGGACCGUGAG | 10139 |
| 3_39 | | | | 54631101 | GAUG | |
| 10859_ | LILRB1 | EXON | − | chr19: 54631082- | CAGAUCAGGACCGUGAG | 10140 |
| 3_40 | | | | 54631102 | GAU | |
| 10859_ | LILRB1 | EXON | − | chr19: 54631083- | ACAGAUCAGGACCGUGA | 10141 |
| 3_42 | | | | 54631103 | GGA | |
| 10859_ | LILRB1 | EXON | − | chr19: 54631087- | CGAGACAGAUCAGGACC | 10142 |
| 3_45 | | | | 54631107 | GUG | |
| 10859_ | LILRB1 | EXON | − | chr19: 54631096- | AAAUCUCACCGAGACAG | 10143 |
| 3_50 | | | | 54631116 | AUC | |
| 10859_ | LILRB1 | EXON | + | chr19: 54631259- | CUCUCUUCCAGGGCUGA | 10144 |
| 4_3 | | | | 54631279 | GUC | |
| 10859_ | LILRB1 | EXON | + | chr19: 54631260- | UCUCUUCCAGGGCUGAG | 10145 |
| 4_4 | | | | 54631280 | UCU | |
| 10859_ | LILRB1 | EXON | + | chr19: 54631267- | CAGGGCUGAGUCUGGGC | 10146 |
| 4_7 | | | | 54631287 | CCC | |
| 10859_ | LILRB1 | EXON | + | chr19: 54631280- | GGGCCCCCGGACCCACG | 10147 |
| 4_8 | | | | 54631300 | UGC | |
| 10859_ | LILRB1 | EXON | + | chr19: 54631284- | CCCCGGACCCACGUGCA | 10148 |
| 4_9 | | | | 54631304 | GGC | |
| 10859_ | LILRB1 | EXON | − | chr19: 54631255- | CAGCCCUGGAAGAGAGU | 10149 |
| 4_11 | | | | 54631275 | UCC | |
| 10859_ | LILRB1 | EXON | − | chr19: 54631269- | CGGGGGCCCAGACUCAG | 10150 |
| 4_15 | | | | 54631289 | CCC | |
| 10859_ | LILRB1 | EXON | − | chr19: 54631286- | CUGCCUGCACGUGGGUC | 10151 |
| 4_17 | | | | 54631306 | CGG | |
| 10859_ | LILRB1 | EXON | − | chr19: 54631287- | CCUGCCUGCACGUGGGU | 10152 |
| 4_18 | | | | 54631307 | CCG | |
| 10859_ | LILRB1 | EXON | − | chr19: 54631288- | ACCUGCCUGCACGUGGG | 10153 |
| 4_20 | | | | 54631308 | UCC | |
| 10859_ | LILRB1 | EXON | − | chr19: 54631289- | CACCUGCCUGCACGUGG | 10154 |
| 4_21 | | | | 54631309 | GUC | |
| 10859_ | LILRB1 | EXON | − | chr19: 54631294- | AGACUCACCUGCCUGCA | 10155 |
| 4_24 | | | | 54631314 | CGU | |
| 10859_ | LILRB1 | EXON | − | chr19: 54631295- | CAGACUCACCUGCCUGC | 10156 |
| 4_25 | | | | 54631315 | ACG | |
| 10859_ | LILRB1 | EXON | + | chr19: 54631502- | ACCUCCCCAAGCCCACC | 10157 |
| 5_5 | | | | 54631522 | CUC | |
| 10859_ | LILRB1 | EXON | + | chr19: 54631503- | CCUCCCCAAGCCCACCC | 10158 |
| 5_6 | | | | 54631523 | UCU | |
| 10859_ | LILRB1 | EXON | + | chr19: 54631513- | CCCACCCUCUGGGCUGA | 10159 |
| 5_8 | | | | 54631533 | ACC | |
| 10859_ | LILRB1 | EXON | + | chr19: 54631530- | ACCAGGCUCUGUGAUCA | 10160 |
| 5_10 | | | | 54631550 | CCC | |
| 10859_ | LILRB1 | EXON | + | chr19: 54631531- | CCAGGCUCUGUGAUCAC | 10161 |
| 5_12 | | | | 54631551 | CCA | |
| 10859_ | LILRB1 | EXON | + | chr19: 54631532- | CAGGCUCUGUGAUCACC | 10162 |
| 5_15 | | | | 54631552 | CAG | |
| 10859_ | LILRB1 | EXON | + | chr19: 54631550- | AGGGGAGUCCUGUGACC | 10163 |
| 5_16 | | | | 54631570 | CUC | |
| 10859_ | LILRB1 | EXON | + | chr19: 54631557- | UCCUGUGACCCUCAGGU | 10164 |
| 5_19 | | | | 54631577 | GUC | |
| 10859_ | LILRB1 | EXON | + | chr19: 54631558- | CCUGUGACCCUCAGGUG | 10165 |
| 5_20 | | | | 54631578 | UCA | |
| 10859_ | LILRB1 | EXON | + | chr19: 54631559- | CUGUGACCCUCAGGUGU | 10166 |
| 5_22 | | | | 54631579 | CAG | |
| 10859_ | LILRB1 | EXON | + | chr19: 54631560- | UGUGACCCUCAGGUGUC | 10167 |
| 5_24 | | | | 54631580 | AGG | |
| 10859_ | LILRB1 | EXON | + | chr19: 54631561- | GUGACCCUCAGGUGUCA | 10168 |
| 5_25 | | | | 54631581 | GGG | |
| 10859_ | LILRB1 | EXON | + | chr19: 54631566- | CCUCAGGUGUCAGGGGG | 10169 |
| 5_28 | | | | 54631586 | GCC | |
| 10859_ | LILRB1 | EXON | + | chr19: 54631575- | UCAGGGGGGCCAGGAG | 10170 |
| 5_30 | | | | 54631595 | ACCC | |
| 10859_ | LILRB1 | EXON | + | chr19: 54631613- | GAGAAAAGAAAACAGC | 10171 |
| 5_38 | | | | 54631633 | ACCC | |
| 10859_ | LILRB1 | EXON | + | chr19: 54631622- | AAACAGCACCCUGGAUU | 10172 |
| 5_40 | | | | 54631642 | ACA | |
| 10859_ | LILRB1 | EXON | + | chr19: 54631632- | CUGGAUUACACGGAUCC | 10173 |
| 5_42 | | | | 54631652 | CAC | |
| 10859_ | LILRB1 | EXON | + | chr19: 54631647- | CCCACAGGAGCUUGUGA | 10174 |
| 5_48 | | | | 54631667 | AGA | |
| 10859_ | LILRB1 | EXON | + | chr19: 54631648- | CCACAGGAGCUUGUGAA | 10175 |
| 5_49 | | | | 54631668 | GAA | |
| 10859_ | LILRB1 | EXON | + | chr19: 54631676- | UCCCCAUCCCAUCCAUC | 10176 |
| 5_53 | | | | 54631696 | ACC | |
| 10859_ | LILRB1 | EXON | + | chr19: 54631677- | CCCCAUCCCAUCCAUCA | 10177 |
| 5_54 | | | | 54631697 | CCU | |
| 10859_ | LILRB1 | EXON | + | chr19: 54631687- | UCCAUCACCUGGGAACA | 10178 |
| 5_58 | | | | 54631707 | CAC | |
| 10859_ | LILRB1 | EXON | + | chr19: 54631688- | CCAUCACCUGGGAACAC | 10179 |
| 5_59 | | | | 54631708 | ACA | |
| 10859_ | LILRB1 | EXON | + | chr19: 54631691- | UCACCUGGGAACACACA | 10180 |
| 5_60 | | | | 54631711 | GGG | |
| 10859_ | LILRB1 | EXON | + | chr19: 54631708- | GGGCGGUAUCGCUGUU | 10181 |
| 5_61 | | | | 54631728 | ACUA | |
| 10859_ | LILRB1 | EXON | + | chr19: 54631723- | UACUAUGGUAGCGACAC | 10182 |
| 5_62 | | | | 54631743 | UGC | |
| 10859_ | LILRB1 | EXON | + | chr19: 54631749- | CUCAGAGAGCAGUGACC | 10183 |
| 5_68 | | | | 54631769 | CCC | |
| 10859_ | LILRB1 | EXON | + | chr19: 54631755- | GAGCAGUGACCCCCUGG | 10184 |
| 5_69 | | | | 54631775 | AGC | |
| 10859_ | LILRB1 | EXON | + | chr19: 54631758- | CAGUGACCCCCUGGAGC | 10185 |
| 5_70 | | | | 54631778 | UGG | |
| 10859_ | LILRB1 | EXON | + | chr19: 54631765- | CCCCUGGAGCUGGUGGU | 10186 |
| 5_71 | | | | 54631785 | GAC | |
| 10859_ | LILRB1 | EXON | + | chr19: 54631781- | UGACAGGUGAGCUGAC | 10187 |
| 5_75 | | | | 54631801 | ACUC | |
| 10859_ | LILRB1 | EXON | + | chr19: 54631782- | GACAGGUGAGCUGACAC | 10188 |
| 5_76 | | | | 54631802 | UCA | |
| 10859_ | LILRB1 | EXON | + | chr19: 54631783- | ACAGGUGAGCUGACACU | 10189 |
| 5_77 | | | | 54631803 | CAG | |
| 10859_ | LILRB1 | EXON | − | chr19: 54631486- | AGGUGCCCUGGAAGGA | 10190 |
| 5_79 | | | | 54631506 | AAUC | |
| 10859_ | LILRB1 | EXON | − | chr19: 54631494- | GCUUGGGGAGGUGCCCU | 10191 |
| 5_82 | | | | 54631514 | GGA | |
| 10859_ | LILRB1 | EXON | − | chr19: 54631498- | GUGGGCUUGGGGAGGU | 10192 |
| 5_85 | | | | 54631518 | GCCC | |
| 10859_ | LILRB1 | EXON | − | chr19: 54631506- | CCCAGAGGGUGGGCUUG | 10193 |
| 5_89 | | | | 54631526 | GGG | |
| 10859_ | LILRB1 | EXON | − | chr19: 54631509- | CAGCCCAGAGGGUGGGC | 10194 |
| 5_90 | | | | 54631529 | UUG | |
| 10859_ | LILRB1 | EXON | − | chr19: 54631510- | UCAGCCCAGAGGGUGGG | 10195 |
| 5_92 | | | | 54631530 | CUU | |
| 10859_ | LILRB1 | EXON | − | chr19: 54631511- | UUCAGCCCAGAGGGUGG | 10196 |
| 5_95 | | | | 54631531 | GCU | |
| 10859_ | LILRB1 | EXON | − | chr19: 54631516- | CCUGGUUCAGCCCAGAG | 10197 |
| 5_97 | | | | 54631536 | GGU | |
| 10859_ | LILRB1 | EXON | − | chr19: 54631517- | GCCUGGUUCAGCCCAGA | 10198 |
| 5_98 | | | | 54631537 | GGG | |
| 10859_ | LILRB1 | EXON | − | chr19: 54631520- | AGAGCCUGGUUCAGCCC | 10199 |
| 5_100 | | | | 54631540 | AGA | |
| 10859_ | LILRB1 | EXON | − | chr19: 54631521- | CAGAGCCUGGUUCAGCC | 10200 |
| 5_101 | | | | 54631541 | CAG | |
| 10859_ | LILRB1 | EXON | − | chr19: 54631534- | CCCUGGGUGAUCACAGA | 10201 |
| 5_104 | | | | 54631554 | GCC | |
| 10859_ | LILRB1 | EXON | − | chr19: 54631550- | GAGGGUCACAGGACUCC | 10202 |
| 5_106 | | | | 54631570 | CCU | |
| 10859_ | LILRB1 | EXON | − | chr19: 54631551- | UGAGGGUCACAGGACUC | 10203 |
| 5_107 | | | | 54631571 | CCC | |
| 10859_ | LILRB1 | EXON | − | chr19: 54631561- | CCCUGACACCUGAGGGU | 10204 |
| 5_109 | | | | 54631581 | CAC | |
| 10859_ | LILRB1 | EXON | − | chr19: 54631568- | CUGGCCCCCCUGACACC | 10205 |
| 5_111 | | | | 54631588 | UGA | |
| 10859_ | LILRB1 | EXON | − | chr19: 54631569- | CCUGGCCCCCCUGACAC | 10206 |
| 5_112 | | | | 54631589 | CUG | |
| 10859_ | LILRB1 | EXON | − | chr19: 54631587- | GACGGUACUCCUGGGUC | 10207 |
| 5_115 | | | | 54631607 | UCC | |
| 10859_ | LILRB1 | EXON | − | chr19: 54631595- | UCUAUAUAGACGGUAC | 10208 |
| 5_119 | | | | 54631615 | UCCU | |
| 10859_ | LILRB1 | EXON | − | chr19: 54631596- | CUCUAUAUAGACGGUAC | 10209 |
| 5_120 | | | | 54631616 | UCC | |
| 10859_ | LILRB1 | EXON | − | chr19: 54631605- | UUUUCUUUUCUCUAUA | 10210 |
| 5_125 | | | | 54631625 | UAGA | |
| 10859_ | LILRB1 | EXON | − | chr19: 54631633- | UGUGGGAUCCGUGUAA | 10211 |
| 5_126 | | | | 54631653 | UCCA | |
| 10859_ | LILRB1 | EXON | − | chr19: 54631634- | CUGUGGGAUCCGUGUA | 10212 |
| 5_127 | | | | 54631654 | AUCC | |
| 10859_ | LILRB1 | EXON | − | chr19: 54631650- | CCUUCUUCACAAGCUCC | 10213 |
| 5_131 | | | | 54631670 | UGU | |
| 10859_ | LILRB1 | EXON | − | chr19: 54631651- | CCCUUCUUCACAAGCUC | 10214 |
| 5_132 | | | | 54631671 | CUG | |
| 10859_ | LILRB1 | EXON | − | chr19: 54631674- | UGAUGGAUGGGAUGGG | 10215 |
| 5_135 | | | | 54631694 | GAAC | |
| 10859_ | LILRB1 | EXON | − | chr19: 54631680- | CCCAGGUGAUGGAUGG | 10216 |
| 5_137 | | | | 54631700 | GAUG | |
| 10859_ | LILRB1 | EXON | − | chr19: 54631681- | UCCCAGGUGAUGGAUG | 10217 |
| 5_140 | | | | 54631701 | GGAU | |
| 10859_ | LILRB1 | EXON | − | chr19: 54631682- | UUCCCAGGUGAUGGAU | 10218 |
| 5_141 | | | | 54631702 | GGGA | |
| 10859_ | LILRB1 | EXON | − | chr19: 54631686- | UGUGUUCCCAGGUGAU | 10219 |
| 5_144 | | | | 54631706 | GGAU | |
| 10859_ | LILRB1 | EXON | − | chr19: 54631687- | GUGUGUUCCCAGGUGA | 10220 |
| 5_146 | | | | 54631707 | UGGA | |
| 10859_ | LILRB1 | EXON | − | chr19: 54631691- | CCCUGUGUGUUCCCAGG | 10221 |
| 5_148 | | | | 54631711 | UGA | |
| 10859_ | LILRB1 | EXON | − | chr19: 54631697- | AUACCGCCCUGUGUGUU | 10222 |
| 5_150 | | | | 54631717 | CCC | |
| 10859_ | LILRB1 | EXON | − | chr19: 54631749- | GGGGGUCACUGCUCUCU | 10223 |
| 5_151 | | | | 54631769 | GAG | |
| 10859_ | LILRB1 | EXON | − | chr19: 54631767- | CUGUCACCACCAGCUCC | 10224 |
| 5_153 | | | | 54631787 | AGG | |
| 10859_ | LILRB1 | EXON | − | chr19: 54631768- | CCUGUCACCACCAGCUC | 10225 |
| 5_154 | | | | 54631788 | CAG | |
| 10859_ | LILRB1 | EXON | − | chr19: 54631769- | ACCUGUCACCACCAGCU | 10226 |
| 5_155 | | | | 54631789 | CCA | |
| 10859_ | LILRB1 | EXON | − | chr19: 54631770- | CACCUGUCACCACCAGC | 10227 |
| 5_157 | | | | 54631790 | UCC | |
| 10859_ | LILRB1 | EXON | + | chr19: 54631956- | CUCAGCCCAGCCCAGCC | 10228 |
| 62 | | | | 54631976 | CCG | |
| 10859_ | LILRB1 | EXON | + | chr19: 54631966- | CCCAGCCCCGUGGUGAA | 10229 |
| 6_6 | | | | 54631986 | CUC | |
| 10859_ | LILRB1 | EXON | + | chr19: 54631969- | AGCCCCGUGGUGAACUC | 10230 |
| 6_8 | | | | 54631989 | AGG | |
| 10859_ | LILRB1 | EXON | + | chr19: 54631970- | GCCCCGUGGUGAACUCA | 10231 |
| 6_10 | | | | 54631990 | GGA | |
| 10859_ | LILRB1 | EXON | + | chr19: 54631998- | AACCCUCCAGUGUGACU | 10232 |
| 6_12 | | | | 54632018 | CAC | |
| 10859_ | LILRB1 | EXON | + | chr19: 54632001- | CCUCCAGUGUGACUCAC | 10233 |
| 6_13 | | | | 54632021 | AGG | |
| 10859_ | LILRB1 | EXON | + | chr19: 54632011- | GACUCACAGGUGGCAUU | 10234 |
| 6_14 | | | | 54632031 | UGA | |
| 10859_ | LILRB1 | EXON | + | chr19: 54632028- | UGAUGGCUUCAUUCUG | 10235 |
| 6_17 | | | | 54632048 | UGUA | |
| 10859_ | LILRB1 | EXON | + | chr19: 54632032- | GGCUUCAUUCUGUGUA | 10236 |
| 6_21 | | | | 54632052 | AGGA | |
| 10859_ | LILRB1 | EXON | + | chr19: 54632080- | AACUCCCAGCCCCAUGC | 10237 |
| 6_29 | | | | 54632100 | CCG | |
| 10859_ | LILRB1 | EXON | + | chr19: 54632081- | ACUCCCAGCCCCAUGCC | 10238 |
| 6_30 | | | | 54632101 | CGU | |
| 10859_ | LILRB1 | EXON | + | chr19: 54632106- | GUCCCGCGCCAUCUUCU | 10239 |
| 6_32 | | | | 54632126 | CCG | |
| 10859_ | LILRB1 | EXON | + | chr19: 54632107- | UCCCGCGCCAUCUUCUC | 10240 |
| 6_33 | | | | 54632127 | CGU | |
| 10859_ | LILRB1 | EXON | + | chr19: 54632129- | GCCCCGUGAGCCCGAGU | 10241 |
| 6_37 | | | | 54632149 | CGC | |
| 10859_ | LILRB1 | EXON | + | chr19: 54632132- | CCGUGAGCCCGAGUCGC | 10242 |
| 6_38 | | | | 54632152 | AGG | |
| 10859_ | LILRB1 | EXON | + | chr19: 54632135- | UGAGCCCGAGUCGCAGG | 10243 |
| 6_39 | | | | 54632155 | UGG | |
| 10859_ | LILRB1 | EXON | + | chr19: 54632141- | CGAGUCGCAGGUGGUG | 10244 |
| 6_40 | | | | 54632161 | GUAC | |
| 10859_ | LILRB1 | EXON | + | chr19: 54632177- | ACUCGAACUCUCCCUAU | 10245 |
| 6_44 | | | | 54632197 | GAG | |
| 10859_ | LILRB1 | EXON | + | chr19: 54632199- | GUCUCUACCCAGUGAUC | 10246 |
| 6_46 | | | | 54632219 | UCC | |
| 10859_ | LILRB1 | EXON | + | chr19: 54632208- | CAGUGAUCUCCUGGAGC | 10247 |
| 6_48 | | | | 54632228 | UCC | |
| 10859_ | LILRB1 | EXON | + | chr19: 54632215- | CUCCUGGAGCUCCUGGU | 10248 |
| 6_49 | | | | 54632235 | CCU | |
| 10859_ | LILRB1 | EXON | − | chr19: 54631921- | UAGGCUCCUAGGAGAG | 10249 |
| 6_53 | | | | 54631941 | AAGG | |
| 10859_ | LILRB1 | EXON | − | chr19: 54631924- | AUGUAGGCUCCUAGGA | 10250 |
| 6_57 | | | | 54631944 | GAGA | |
| 10859_ | LILRB1 | EXON | − | chr19: 54631932- | UGGGUUUGAUGUAGGC | 10251 |
| 6_62 | | | | 54631952 | UCCU | |
| 10859_ | LILRB1 | EXON | − | chr19: 54631940- | UGAGAGGGUGGGUUUG | 10252 |
| 6_65 | | | | 54631960 | AUGU | |
| 10859_ | LILRB1 | EXON | − | chr19: 54631951- | CUGGGCUGGGCUGAGA | 10253 |
| 6_66 | | | | 54631971 | GGGU | |
| 10859_ | LILRB1 | EXON | − | chr19: 54631952- | GCUGGGCUGGGCUGAG | 10254 |
| 6_67 | | | | 54631972 | AGGG | |
| 10859_ | LILRB1 | EXON | − | chr19: 54631955- | GGGGCUGGGCUGGGCU | 10255 |
| 6_69 | | | | 54631975 | GAGA | |
| 10859_ | LILRB1 | EXON | − | chr19: 54631956- | CGGGGCUGGGCUGGGCU | 10256 |
| 6_70 | | | | 54631976 | GAG | |
| 10859_ | LILRB1 | EXON | − | chr19: 54631964- | GUUCACCACGGGGCUGG | 10257 |
| 6_75 | | | | 54631984 | GCU | |
| 10859_ | LILRB1 | EXON | − | chr19: 54631965- | AGUUCACCACGGGGCUG | 10258 |
| 6_76 | | | | 54631985 | GGC | |
| 10859_ | LILRB1 | EXON | − | chr19: 54631969- | CCUGAGUUCACCACGGG | 10259 |
| 6_79 | | | | 54631989 | GCU | |
| 10859_ | LILRB1 | EXON | − | chr19: 54631970- | UCCUGAGUUCACCACGG | 10260 |
| 6_80 | | | | 54631990 | GGC | |
| 10859_ | LILRB1 | EXON | − | chr19: 54631974- | UCCCUCCUGAGUUCACC | 10261 |
| 6_83 | | | | 54631994 | ACG | |
| 10859_ | LILRB1 | EXON | − | chr19: 54631975- | UUCCCUCCUGAGUUCAC | 10262 |
| 6_84 | | | | 54631995 | CAC | |
| 10859_ | LILRB1 | EXON | − | chr19: 54631976- | AUUCCCUCCUGAGUUCA | 10263 |
| 6_85 | | | | 54631996 | CCA | |
| 10859_ | LILRB1 | EXON | − | chr19: 54632003- | CACCUGUGAGUCACACU | 10264 |
| 6_89 | | | | 54632023 | GGA | |
| 10859_ | LILRB1 | EXON | − | chr19: 54632004- | CCACCUGUGAGUCACAC | 10265 |
| 6_90 | | | | 54632024 | UGG | |
| 10859_ | LILRB1 | EXON | − | chr19: 54632007- | AUGCCACCUGUGAGUCA | 10266 |
| 6_92 | | | | 54632027 | CAC | |
| 10859_ | LILRB1 | EXON | − | chr19: 54632070- | GCUGGGAGUUCAGGCA | 10267 |
| 6_104 | | | | 54632090 | UUGU | |
| 10859_ | LILRB1 | EXON | − | chr19: 54632071- | GGCUGGGAGUUCAGGC | 10268 |
| 6_105 | | | | 54632091 | AUUG | |
| 10859_ | LILRB1 | EXON | − | chr19: 54632079- | GGGCAUGGGGCUGGGA | 10269 |
| 6_107 | | | | 54632099 | GUUC | |
| 10859_ | LILRB1 | EXON | − | chr19: 54632087- | CGACCCACGGGCAUGGG | 10270 |
| 6_108 | | | | 54632107 | GCU | |
| 10859_ | LILRB1 | EXON | − | chr19: 54632088- | ACGACCCACGGGCAUGG | 10271 |
| 6_110 | | | | 54632108 | GGC | |
| 10859_ | LILRB1 | EXON | − | chr19: 54632092- | CGGGACGACCCACGGGC | 10272 |
| 6_113 | | | | 54632112 | AUG | |
| 10859_ | LILRB1 | EXON | | chr19: 54632093- | GCGGGACGACCCACGGG | 10273 |
| 6_114 | | | | 54632113 | CAU | |
| 10859_ | LILRB1 | EXON | − | chr19: 54632094- | CGCGGGACGACCCACGG | 10274 |
| 6_116 | | | | 54632114 | GCA | |
| 10859_ | LILRB1 | EXON | − | chr19: 54632099- | GAUGGCGCGGGACGACC | 10275 |
| 6_118 | | | | 54632119 | CAC | |
| 10859_ | LILRB1 | EXON | − | chr19: 54632100- | AGAUGGCGCGGGACGAC | 10276 |
| 6_119 | | | | 54632120 | CCA | |
| 10859_ | LILRB1 | EXON | − | chr19: 54632111- | GCCCACGGAGAAGAUGG | 10277 |
| 6_121 | | | | 54632131 | CGC | |
| 10859_ | LILRB1 | EXON | − | chr19: 54632112- | GGCCCACGGAGAAGAUG | 10278 |
| 6_123 | | | | 54632132 | GCG | |
| 10859_ | LILRB1 | EXON | − | chr19: 54632117- | CACGGGGCCCACGGAGA | 10279 |
| 6_125 | | | | 54632137 | AGA | |
| 10859_ | LILRB1 | EXON | − | chr19: 54632126- | ACUCGGGCUCACGGGGC | 10280 |
| 6_129 | | | | 54632146 | CCA | |
| 10859_ | LILRB1 | EXON | − | chr19: 54632133- | ACCUGCGACUCGGGCUC | 10281 |
| 6_131 | | | | 54632153 | ACG | |
| 10859_ | LILRB1 | EXON | − | chr19: 54632134- | CACCUGCGACUCGGGCU | 10282 |
| 6_132 | | | | 54632154 | CAC | |
| 10859_ | LILRB1 | EXON | − | chr19: 54632135- | CCACCUGCGACUCGGGC | 10283 |
| 6_133 | | | | 54632155 | UCA | |
| 10859_ | LILRB1 | EXON | − | chr19: 54632142- | UGUACCACCACCUGCGA | 10284 |
| 6_136 | | | | 54632162 | CUC | |
| 10859_ | LILRB1 | EXON | − | chr19: 54632143- | CUGUACCACCACCUGCG | 10285 |
| 6_137 | | | | 54632163 | ACU | |
| 10859_ | LILRB1 | EXON | − | chr19: 54632191- | CUGGGUAGAGACCACUC | 10286 |
| 6_143 | | | | 54632211 | AUA | |
| 10859_ | LILRB1 | EXON | − | chr19: 54632192- | ACUGGGUAGAGACCACU | 10287 |
| 6_144 | | | | 54632212 | CAU | |
| 10859_ | LILRB1 | EXON | − | chr19: 54632209- | AGGAGCUCCAGGAGAUC | 10288 |
| 6_148 | | | | 54632229 | ACU | |
| 10859_ | LILRB1 | EXON | − | chr19: 54632210- | CAGGAGCUCCAGGAGAU | 10289 |
| 6_149 | | | | 54632230 | CAC | |
| 10859_ | LILRB1 | EXON | − | chr19: 54632220- | CACCUAGGACCAGGAGC | 10290 |
| 6_154 | | | | 54632240 | UCC | |
| 10859_ | LILRB1 | EXON | − | chr19: 54632229- | UGAAUUUCUCACCUAGG | 10291 |
| 6_156 | | | | 54632249 | ACC | |
| 10859_ | LILRB1 | EXON | − | chr19: 54632235- | AUGCUGUGAAUUUCUC | 10292 |
| 6_159 | | | | 54632255 | ACCU | |
| 10859_ | LILRB1 | EXON | + | chr19: 54632477- | CCAUCACUCUCAGUGCA | 10293 |
| 7_7 | | | | 54632497 | GCC | |
| 10859_ | LILRB1 | EXON | + | chr19: 54632488- | AGUGCAGCCAGGUCCUA | 10294 |
| 7_8 | | | | 54632508 | UCG | |
| 10859_ | LILRB1 | EXON | + | chr19: 54632497- | AGGUCCUAUCGUGGCCC | 10295 |
| 7_12 | | | | 54632517 | CUG | |
| 10859_ | LILRB1 | EXON | + | chr19: 54632519- | GAGACCCUGACUCUGCA | 10296 |
| 7_13 | | | | 54632539 | GUG | |
| 10859_ | LILRB1 | EXON | + | chr19: 54632531- | CUGCAGUGUGGCUCUGA | 10297 |
| 7_14 | | | | 54632551 | UGC | |
| 10859_ | LILRB1 | EXON | + | chr19: 54632557- | CAACAGAUUUGUUCUG | 10298 |
| 7_16 | | | | 54632577 | UAUA | |
| 10859_ | LILRB1 | EXON | + | chr19: 54632561- | AGAUUUGUUCUGUAUA | 10299 |
| 7_18 | | | | 54632581 | AGGA | |
| 10859_ | LILRB1 | EXON | + | chr19: 54632562- | GAUUUGUUCUGUAUAA | 10300 |
| 7_21 | | | | 54632582 | GGAC | |
| 10859_ | LILRB1 | EXON | + | chr19: 54632563- | AUUUGUUCUGUAUAAG | 10301 |
| 7_23 | | | | 54632583 | GACG | |
| 10859_ | LILRB1 | EXON | + | chr19: 54632588- | CGUGACUUCCUUCAGCU | 10302 |
| 7_27 | | | | 54632608 | CGC | |
| 10859_ | LILRB1 | EXON | + | chr19: 54632602- | GCUCGCUGGCGCACAGC | 10303 |
| 7_30 | | | | 54632622 | CCC | |
| 10859_ | LILRB1 | EXON | + | chr19: 54632606- | GCUGGCGCACAGCCCCA | 10304 |
| 7_32 | | | | 54632626 | GGC | |
| 10859_ | LILRB1 | EXON | + | chr19: 54632607- | CUGGCGCACAGCCCCAG | 10305 |
| 7_33 | | | | 54632627 | GCU | |
| 10859_ | LILRB1 | EXON | + | chr19: 54632617- | GCCCCAGGCUGGGCUCU | 10306 |
| 7_34 | | | | 54632637 | CCC | |
| 10859_ | LILRB1 | EXON | + | chr19: 54632632- | CUCCCAGGCCAACUUCA | 10307 |
| 7_36 | | | | 54632652 | CCC | |
| 10859_ | LILRB1 | EXON | + | chr19: 54632633- | UCCCAGGCCAACUUCAC | 10308 |
| 7_37 | | | | 54632653 | CCU | |
| 10859_ | LILRB1 | EXON | + | chr19: 54632654- | GGCCCUGUGAGCCGCUC | 10309 |
| 7_42 | | | | 54632674 | CUA | |
| 10859_ | LILRB1 | EXON | + | chr19: 54632655- | GCCCUGUGAGCCGCUCC | 10310 |
| 7_43 | | | | 54632675 | UAC | |
| 10859_ | LILRB1 | EXON | + | chr19: 54632656- | CCCUGUGAGCCGCUCCU | 10311 |
| 7_45 | | | | 54632676 | ACG | |
| 10859_ | LILRB1 | EXON | + | chr19: 54632657- | CCUGUGAGCCGCUCCUA | 10312 |
| 7_46 | | | | 54632677 | CGG | |
| 10859_ | LILRB1 | EXON | + | chr19: 54632675- | GGGGGCCAGUACAGAU | 10313 |
| 7_47 | | | | 54632695 | GCUA | |
| 10859_ | LILRB1 | EXON | + | chr19: 54632700- | CACACAACCUCUCCUCC | 10314 |
| 7_49 | | | | 54632720 | GAG | |
| 10859_ | LILRB1 | EXON | + | chr19: 54632704- | CAACCUCUCCUCCGAGU | 10315 |
| 7_50 | | | | 54632724 | GGU | |
| 10859_ | LILRB1 | EXON | + | chr19: 54632722- | GUCGGCCCCCAGCGACC | 10316 |
| 7_52 | | | | 54632742 | CCC | |
| 10859_ | LILRB1 | EXON | + | chr19: 54632738- | CCCCUGGACAUCCUGAU | 10317 |
| 7_53 | | | | 54632758 | CGC | |
| 10859_ | LILRB1 | EXON | + | chr19: 54632743- | GGACAUCCUGAUCGCAG | 10318 |
| 7_56 | | | | 54632763 | GUG | |
| 10859_ | LILRB1 | EXON | + | chr19: 54632753- | AUCGCAGGUGAGGAGCC | 10319 |
| 7_59 | | | | 54632773 | CAG | |
| 10859_ | LILRB1 | EXON | + | chr19: 54632754- | UCGCAGGUGAGGAGCCC | 10320 |
| 7_60 | | | | 54632774 | AGC | |
| 10859_ | LILRB1 | EXON | − | chr19: 54632446- | CACCUGGGAAAAGGUG | 10321 |
| 7_61 | | | | 54632466 | GUCA | |
| 10859_ | LILRB1 | EXON | − | chr19: 54632452- | UAGAAACACCUGGGAA | 10322 |
| 7_64 | | | | 54632472 | AAGG | |
| 10859_ | LILRB1 | EXON | − | chr19: 54632455- | UCUUAGAAACACCUGGG | 10323 |
| 7_65 | | | | 54632475 | AAA | |
| 10859_ | LILRB1 | EXON | − | chr19: 54632461- | AUGGCUUCUUAGAAAC | 10324 |
| 7_66 | | | | 54632481 | ACCU | |
| 10859_ | LILRB1 | EXON | − | chr19: 54632462- | GAUGGCUUCUUAGAAA | 10325 |
| 7_68 | | | | 54632482 | CACC | |
| 10859_ | LILRB1 | EXON | − | chr19: 54632480- | CCUGGCUGCACUGAGAG | 10326 |
| 7_72 | | | | 54632500 | UGA | |
| 10859_ | LILRB1 | EXON | − | chr19: 54632498- | UCAGGGGCCACGAUAGG | 10327 |
| 7_75 | | | | 54632518 | ACC | |
| 10859_ | LILRB1 | EXON | − | chr19: 54632504- | GUCUCCUCAGGGGCCAC | 10328 |
| 7_76 | | | | 54632524 | GAU | |
| 10859_ | LILRB1 | EXON | − | chr19: 54632514- | CAGAGUCAGGGUCUCCU | 10329 |
| 7_78 | | | | 54632534 | CAG | |
| 10859_ | LILRB1 | EXON | − | chr19: 54632515- | GCAGAGUCAGGGUCUCC | 10330 |
| 7_79 | | | | 54632535 | UCA | |
| 10859_ | LILRB1 | EXON | − | chr19: 54632516- | UGCAGAGUCAGGGUCUC | 10331 |
| 7_80 | | | | 54632536 | CUC | |
| 10859_ | LILRB1 | EXON | − | chr19: 54632526- | AGAGCCACACUGCAGAG | 10332 |
| 7_83 | | | | 54632546 | UCA | |
| 10859_ | LILRB1 | EXON | − | chr19: 54632527- | CAGAGCCACACUGCAGA | 10333 |
| 7_84 | | | | 54632547 | GUC | |
| 10859_ | LILRB1 | EXON | − | chr19: 54632599- | GCUGUGCGCCAGCGAGC | 10334 |
| 7_93 | | | | 54632619 | UGA | |
| 10859_ | LILRB1 | EXON | − | chr19: 54632621- | GCCUGGGAGAGCCCAGC | 10335 |
| 7_99 | | | | 54632641 | CUG | |
| 10859_ | LILRB1 | EXON | − | chr19: 54632622- | GGCCUGGGAGAGCCCAG | 10336 |
| 7_100 | | | | 54632642 | CCU | |
| 10859_ | LILRB1 | EXON | − | chr19: 54632623- | UGGCCUGGGAGAGCCCA | 10337 |
| 7_102 | | | | 54632643 | GCC | |
| 10859_ | LILRB1 | EXON | − | chr19: 54632637- | GCCCAGGGUGAAGUUG | 10338 |
| 7_106 | | | | 54632657 | GCCU | |
| 10859_ | LILRB1 | EXON | − | chr19: 54632638- | GGCCCAGGGUGAAGUU | 10339 |
| 7_107 | | | | 54632658 | GGCC | |
| 10859_ | LILRB1 | EXON | − | chr19: 54632643- | CACAGGGCCCAGGGUGA | 10340 |
| 7_110 | | | | 54632663 | AGU | |
| 10859_ | LILRB1 | EXON | − | chr19: 54632652- | GGAGCGGCUCACAGGGC | 10341 |
| 7_112 | | | | 54632672 | CCA | |
| 10859_ | LILRB1 | EXON | − | chr19: 54632653- | AGGAGCGGCUCACAGGG | 10342 |
| 7_113 | | | | 54632673 | CCC | |
| 10859_ | LILRB1 | EXON | − | chr19: 54632659- | CCCCGUAGGAGCGGCUC | 10343 |
| 7_115 | | | | 54632679 | ACA | |
| 10859_ | LILRB1 | EXON | − | chr19: 54632660- | CCCCCGUAGGAGCGGCU | 10344 |
| 7_116 | | | | 54632680 | CAC | |
| 10859_ | LILRB1 | EXON | − | chr19: 54632668- | UGUACUGGCCCCCGUAG | 10345 |
| 7_118 | | | | 54632688 | GAG | |
| 10859_ | LILRB1 | EXON | − | chr19: 54632673- | GCAUCUGUACUGGCCCC | 10346 |
| 7_119 | | | | 54632693 | CGU | |
| 10859_ | LILRB1 | EXON | − | chr19: 54632683- | GUGCACCGUAGCAUCUG | 10347 |
| 7_123 | | | | 54632703 | UAC | |
| 10859_ | LILRB1 | EXON | − | chr19: 54632710- | GGGCCGACCACUCGGAG | 10348 |
| 7_124 | | | | 54632730 | GAG | |
| 10859_ | LILRB1 | EXON | − | chr19: 54632715- | GCUGGGGGCCGACCACU | 10349 |
| 7_126 | | | | 54632735 | CGG | |
| 10859_ | LILRB1 | EXON | − | chr19: 54632718- | GUCGCUGGGGGCCGACC | 10350 |
| 7_129 | | | | 54632738 | ACU | |
| 10859_ | LILRB1 | EXON | − | chr19: 54632730- | GAUGUCCAGGGGGUCGC | 10351 |
| 7_132 | | | | 54632750 | UGG | |
| 10859_ | LILRB1 | EXON | − | chr19: 54632731- | GGAUGUCCAGGGGGUC | 10352 |
| 7_133 | | | | 54632751 | GCUG | |
| 10859_ | LILRB1 | EXON | − | chr19: 54632732- | AGGAUGUCCAGGGGGU | 10353 |
| 7_135 | | | | 54632752 | CGCU | |
| 10859_ | LILRB1 | EXON | − | chr19: 54632733- | CAGGAUGUCCAGGGGG | 10354 |
| 7_137 | | | | 54632753 | UCGC | |
| 10859_ | LILRB1 | EXON | − | chr19: 54632740- | CUGCGAUCAGGAUGUCC | 10355 |
| 7_139 | | | | 54632760 | AGG | |
| 10859_ | LILRB1 | EXON | − | chr19: 54632741- | CCUGCGAUCAGGAUGUC | 10356 |
| 7_140 | | | | 54632761 | CAG | |
| 10859_ | LILRB1 | EXON | − | chr19: 54632742- | ACCUGCGAUCAGGAUGU | 10357 |
| 7_141 | | | | 54632762 | CCA | |
| 10859_ | LILRB1 | EXON | − | chr19: 54632743- | CACCUGCGAUCAGGAUG | 10358 |
| 7_144 | | | | 54632763 | UCC | |
| 10859_ | LILRB1 | EXON | − | chr19: 54632752- | UGGGCUCCUCACCUGCG | 10359 |
| 7_146 | | | | 54632772 | AUC | |
| 10859_ | LILRB1 | EXON | + | chr19: 54633022- | CUAUGACAGAGUCUCCC | 10360 |
| 8_4 | | | | 54633042 | UCU | |
| 10859_ | LILRB1 | EXON | + | chr19: 54633031- | AGUCUCCCUCUCGGUGC | 10361 |
| 8_7 | | | | 54633051 | AGC | |
| 10859_ | LILRB1 | EXON | + | chr19: 54633032- | GUCUCCCUCUCGGUGCA | 10362 |
| 8_8 | | | | 54633052 | GCC | |
| 10859_ | LILRB1 | EXON | + | chr19: 54633040- | CUCGGUGCAGCCGGGCC | 10363 |
| 8_9 | | | | 54633060 | CCA | |
| 10859_ | LILRB1 | EXON | + | chr19: 54633043- | GGUGCAGCCGGGCCCCA | 10364 |
| 8_10 | | | | 54633063 | CGG | |
| 10859_ | LILRB1 | EXON | + | chr19: 54633050- | CCGGGCCCCACGGUGGC | 10365 |
| 8_13 | | | | 54633070 | CUC | |
| 10859_ | LILRB1 | EXON | + | chr19: 54633082- | GACCCUGCUGUGUCAGU | 10366 |
| 8_17 | | | | 54633102 | CAC | |
| 10859_ | LILRB1 | EXON | + | chr19: 54633083- | ACCCUGCUGUGUCAGUC | 10367 |
| 8_19 | | | | 54633103 | ACA | |
| 10859_ | LILRB1 | EXON | + | chr19: 54633087- | UGCUGUGUCAGUCACAG | 10368 |
| 8_21 | | | | 54633107 | GGA | |
| 10859_ | LILRB1 | EXON | + | chr19: 54633112- | GCAAACUUUCCUUCUGA | 10369 |
| 8_23 | | | | 54633132 | CCA | |
| 10859_ | LILRB1 | EXON | + | chr19: 54633115- | AACUUUCCUUCUGACCA | 10370 |
| 8_26 | | | | 54633135 | AGG | |
| 10859_ | LILRB1 | EXON | + | chr19: 54633116- | ACUUUCCUUCUGACCAA | 10371 |
| 8_28 | | | | 54633136 | GGA | |
| 10859_ | LILRB1 | EXON | + | chr19: 54633117- | CUUUCCUUCUGACCAAG | 10372 |
| 8_30 | | | | 54633137 | GAG | |
| 10859_ | LILRB1 | EXON | + | chr19: 54633118- | UUUCCUUCUGACCAAGG | 10373 |
| 8_31 | | | | 54633138 | AGG | |
| 10859_ | LILRB1 | EXON | + | chr19: 54633135- | AGGGGGCAGCUGAUGA | 10374 |
| 8_35 | | | | 54633155 | CCCA | |
| 10859_ | LILRB1 | EXON | + | chr19: 54633172- | GUACCAAUCUCAAAAAU | 10375 |
| 8_36 | | | | 54633192 | ACC | |
| 10859_ | LILRB1 | EXON | + | chr19: 54633187- | AUACCAGGCUGAAUUCC | 10376 |
| 8_39 | | | | 54633207 | CCA | |
| 10859_ | LILRB1 | EXON | + | chr19: 54633188- | UACCAGGCUGAAUUCCC | 10377 |
| 8_40 | | | | 54633208 | CAU | |
| 10859_ | LILRB1 | EXON | + | chr19: 54633211- | UCCUGUGACCUCAGCCC | 10378 |
| 8_44 | | | | 54633231 | AUG | |
| 10859_ | LILRB1 | EXON | + | chr19: 54633212- | CCUGUGACCUCAGCCCA | 10379 |
| 8_46 | | | | 54633232 | UGC | |
| 10859_ | LILRB1 | EXON | + | chr19: 54633213- | CUGUGACCUCAGCCCAU | 10380 |
| 8_47 | | | | 54633233 | GCG | |
| 10859_ | LILRB1 | EXON | + | chr19: 54633222- | CAGCCCAUGCGGGGACC | 10381 |
| 8_48 | | | | 54633242 | UAC | |
| 10859_ | LILRB1 | EXON | + | chr19: 54633230- | GCGGGGACCUACAGGUG | 10382 |
| 8_49 | | | | 54633250 | CUA | |
| 10859_ | LILRB1 | EXON | + | chr19: 54633280- | GACUCACCCCAGUGACC | 10383 |
| 8_52 | | | | 54633300 | CCC | |
| 10859_ | LILRB1 | EXON | + | chr19: 54633289- | CAGUGACCCCCUGGAGC | 10384 |
| 8_54 | | | | 54633309 | UCG | |
| 10859_ | LILRB1 | EXON | + | chr19: 54633296- | CCCCUGGAGCUCGUGGU | 10385 |
| 8_55 | | | | 54633316 | CUC | |
| 10859_ | LILRB1 | EXON | + | chr19: 54633299- | CUGGAGCUCGUGGUCUC | 10386 |
| 8_58 | | | | 54633319 | AGG | |
| 10859_ | LILRB1 | EXON | + | chr19: 54633300- | UGGAGCUCGUGGUCUCA | 10387 |
| 8_59 | | | | 54633320 | GGU | |
| 10859_ | LILRB1 | EXON | + | chr19: 54633301- | GGAGCUCGUGGUCUCAG | 10388 |
| 8_61 | | | | 54633321 | GUG | |
| 10859_ | LILRB1 | EXON | + | chr19: 54633302- | GAGCUCGUGGUCUCAGG | 10389 |
| 8_62 | | | | 54633322 | UGG | |
| 10859_ | LILRB1 | EXON | − | chr19: 54632998- | GUCCUGGAGAGAAGAA | 10390 |
| 8_63 | | | | 54633018 | GGAU | |
| 10859_ | LILRB1 | EXON | − | chr19: 54632999- | UGUCCUGGAGAGAAGA | 10391 |
| 8_64 | | | | 54633019 | AGGA | |
| 10859_ | LILRB1 | EXON | − | chr19: 54633003- | GAACUGUCCUGGAGAG | 10392 |
| 8_66 | | | | 54633023 | AAGA | |
| 10859_ | LILRB1 | EXON | − | chr19: 54633014- | ACUCUGUCAUAGAACUG | 10393 |
| 8_74 | | | | 54633034 | UCC | |
| 10859_ | LILRB1 | EXON | − | chr19: 54633039- | GGGGCCCGGCUGCACCG | 10394 |
| 8_79 | | | | 54633059 | AGA | |
| 10859_ | LILRB1 | EXON | − | chr19: 54633040- | UGGGGCCCGGCUGCACC | 10395 |
| 8_81 | | | | 54633060 | GAG | |
| 10859_ | LILRB1 | EXON | − | chr19: 54633053- | CCUGAGGCCACCGUGGG | 10396 |
| 8_86 | | | | 54633073 | GCC | |
| 10859_ | LILRB1 | EXON | − | chr19: 54633058- | UCUCUCCUGAGGCCACC | 10397 |
| 8_87 | | | | 54633078 | GUG | |
| 10859_ | LILRB1 | EXON | − | chr19: 54633059- | UUCUCUCCUGAGGCCAC | 10398 |
| 8_88 | | | | 54633079 | CGU | |
| 10859_ | LILRB1 | EXON | − | chr19: 54633060- | GUUCUCUCCUGAGGCCA | 10399 |
| 8_90 | | | | 54633080 | CCG | |
| 10859_ | LILRB1 | EXON | − | chr19: 54633069- | CAGGGUCACGUUCUCUC | 10400 |
| 8_92 | | | | 54633089 | CUG | |
| 10859_ | LILRB1 | EXON | − | chr19: 54633087- | UCCCUGUGACUGACACA | 10401 |
| 8_94 | | | | 54633107 | GCA | |
| 10859_ | LILRB1 | EXON | − | chr19: 54633088- | AUCCCUGUGACUGACAC | 10402 |
| 8_95 | | | | 54633108 | AGC | |
| 10859_ | LILRB1 | EXON | − | chr19: 54633124- | CUGCCCCCUCCUUGGUC | 10403 |
| 8_100 | | | | 54633144 | AGA | |
| 10859_ | LILRB1 | EXON | − | chr19: 54633132- | GUCAUCAGCUGCCCCCU | 10404 |
| 8_105 | | | | 54633152 | CCU | |
| 10859_ | LILRB1 | EXON | − | chr19: 54633154- | ACGUUGAUCUUAGACGC | 10405 |
| 8_109 | | | | 54633174 | CAU | |
| 10859_ | LILRB1 | EXON | − | chr19: 54633155- | UACGUUGAUCUUAGAC | 10406 |
| 8_110 | | | | 54633175 | GCCA | |
| 10859_ | LILRB1 | EXON | − | chr19: 54633178- | CAGCCUGGUAUUUUUG | 10407 |
| 8_117 | | | | 54633198 | AGAU | |
| 10859_ | LILRB1 | EXON | − | chr19: 54633193- | GACCCAUGGGGAAUUCA | 10408 |
| 8_119 | | | | 54633213 | GCC | |
| 10859_ | LILRB1 | EXON | − | chr19: 54633205- | CUGAGGUCACAGGACCC | 10409 |
| 8_120 | | | | 54633225 | AUG | |
| 10859_ | LILRB1 | EXON | − | chr19: 54633206- | GCUGAGGUCACAGGACC | 10410 |
| 8_123 | | | | 54633226 | CAU | |
| 10859_ | LILRB1 | EXON | − | chr19: 54633207- | GGCUGAGGUCACAGGAC | 10411 |
| 8_125 | | | | 54633227 | CCA | |
| 10859_ | LILRB1 | EXON | − | chr19: 54633215- | CCCGCAUGGGCUGAGGU | 10412 |
| 8_127 | | | | 54633235 | CAC | |
| 10859_ | LILRB1 | EXON | − | chr19: 54633222- | GUAGGUCCCCGCAUGGG | 10413 |
| 8_129 | | | | 54633242 | CUG | |
| 10859_ | LILRB1 | EXON | − | chr19: 54633228- | GCACCUGUAGGUCCCCG | 10414 |
| 8_131 | | | | 54633248 | CAU | |
| 10859_ | LILRB1 | EXON | − | chr19: 54633229- | AGCACCUGUAGGUCCCC | 10415 |
| 8_132 | | | | 54633249 | GCA | |
| 10859_ | LILRB1 | EXON | − | chr19: 54633240- | CUGUGAGCCGUAGCACC | 10416 |
| 8_134 | | | | 54633260 | UGU | |
| 10859_ | LILRB1 | EXON | − | chr19: 54633267- | GUGAGUCAGCAGGUAG | 10417 |
| 8_139 | | | | 54633287 | GGUU | |
| 10859_ | LILRB1 | EXON | − | chr19: 54633272- | CUGGGGUGAGUCAGCA | 10418 |
| 8_141 | | | | 54633292 | GGUA | |
| 10859_ | LILRB1 | EXON | − | chr19: 54633273- | ACUGGGGUGAGUCAGC | 10419 |
| 8_142 | | | | 54633293 | AGGU | |
| 10859_ | LILRB1 | EXON | − | chr19: 54633277- | GGUCACUGGGGUGAGU | 10420 |
| 8_144 | | | | 54633297 | CAGC | |
| 10859_ | LILRB1 | EXON | − | chr19: 54633289- | CGAGCUCCAGGGGGUCA | 10421 |
| 8_146 | | | | 54633309 | CUG | |
| 10859_ | LILRB1 | EXON | − | chr19: 54633290- | ACGAGCUCCAGGGGGUC | 10422 |
| 8_147 | | | | 54633310 | ACU | |
| 10859_ | LILRB1 | EXON | − | chr19: 54633291- | CACGAGCUCCAGGGGGU | 10423 |
| 8_149 | | | | 54633311 | CAC | |
| 10859_ | LILRB1 | EXON | − | chr19: 54633298- | CUGAGACCACGAGCUCC | 10424 |
| 8_151 | | | | 54633318 | AGG | |
| 10859_ | LILRB1 | EXON | − | chr19: 54633299- | CCUGAGACCACGAGCUC | 10425 |
| 8_152 | | | | 54633319 | CAG | |
| 10859_ | LILRB1 | EXON | − | chr19: 54633300- | ACCUGAGACCACGAGCU | 10426 |
| 8_153 | | | | 54633320 | CCA | |
| 10859_ | LILRB1 | EXON | − | chr19: 54633301- | CACCUGAGACCACGAGC | 10427 |
| 8_156 | | | | 54633321 | UCC | |
| 10859_ | LILRB1 | EXON | + | chr19: 54633624- | UUCUUUUACCCAGGACC | 10428 |
| 9_2 | | | | 54633644 | GUC | |
| 10859_ | LILRB1 | EXON | + | chr19: 54633625- | UCUUUUACCCAGGACCG | 10429 |
| 9_5 | | | | 54633645 | UCU | |
| 10859_ | LILRB1 | EXON | + | chr19: 54633626- | CUUUUACCCAGGACCGU | 10430 |
| 9_6 | | | | 54633646 | CUG | |
| 10859_ | LILRB1 | EXON | + | chr19: 54633627- | UUUUACCCAGGACCGUC | 10431 |
| 9_7 | | | | 54633647 | UGG | |
| 10859_ | LILRB1 | EXON | + | chr19: 54633648- | GGCCCCAGCUCCCCGAC | 10432 |
| 9_12 | | | | 54633668 | AAC | |
| 10859_ | LILRB1 | EXON | + | chr19: 54633666- | ACAGGCCCCACCUCCAC | 10433 |
| 9_13 | | | | 54633686 | AUC | |
| 10859_ | LILRB1 | EXON | + | chr19: 54633679- | CCACAUCUGGUGAGUCC | 10434 |
| 9_16 | | | | 54633699 | CUG | |
| 10859_ | LILRB1 | EXON | − | chr19: 54633620- | GUCCUGGGUAAAAGAA | 10435 |
| 9_17 | | | | 54633640 | UGAG | |
| 10859_ | LILRB1 | EXON | − | chr19: 54633635- | UGGGGCCCCCAGACGGU | 10436 |
| 9_21 | | | | 54633655 | CCU | |
| 10859_ | LILRB1 | EXON | − | chr19: 54633636- | CUGGGGCCCCCAGACGG | 10437 |
| 9_22 | | | | 54633656 | UCC | |
| 10859_ | LILRB1 | EXON | − | chr19: 54633642- | GGGGAGCUGGGGCCCCC | 10438 |
| 9_25 | | | | 54633662 | AGA | |
| 10859_ | LILRB1 | EXON | − | chr19: 54633653- | GGCCUGUUGUCGGGGA | 10439 |
| 9_26 | | | | 54633673 | GCUG | |
| 10859_ | LILRB1 | EXON | − | chr19: 54633654- | GGGCCUGUUGUCGGGG | 10440 |
| 9_27 | | | | 54633674 | AGCU | |
| 10859_ | LILRB1 | EXON | − | chr19: 54633655- | GGGGCCUGUUGUCGGG | 10441 |
| 9_28 | | | | 54633675 | GAGC | |
| 10859_ | LILRB1 | EXON | − | chr19: 54633661- | GGAGGUGGGGCCUGUU | 10442 |
| 9_31 | | | | 54633681 | GUCG | |
| 10859_ | LILRB1 | EXON | − | chr19: 54633662- | UGGAGGUGGGGCCUGU | 10443 |
| 9_34 | | | | 54633682 | UGUC | |
| 10859_ | LILRB1 | EXON | − | chr19: 54633663- | GUGGAGGUGGGGCCUG | 10444 |
| 9_36 | | | | 54633683 | UUGU | |
| 10859_ | LILRB1 | EXON | − | chr19: 54633674- | ACUCACCAGAUGUGGAG | 10445 |
| 9_38 | | | | 54633694 | GUG | |
| 10859_ | LILRB1 | EXON | − | chr19: 54633675- | GACUCACCAGAUGUGGA | 10446 |
| 9_39 | | | | 54633695 | GGU | |
| 10859_ | LILRB1 | EXON | − | chr19: 54633676- | GGACUCACCAGAUGUGG | 10447 |
| 9_41 | | | | 54633696 | AGG | |
| 10859_ | LILRB1 | EXON | − | chr19: 54633679- | CAGGGACUCACCAGAUG | 10448 |
| 9_43 | | | | 54633699 | UGG | |
| 10859_ | LILRB1 | EXON | − | chr19: 54633682- | CCUCAGGGACUCACCAG | 10449 |
| 9_44 | | | | 54633702 | AUG | |
| 10859_ | LILRB1 | EXON | + | chr19: 54633951- | CCUCCCCGUCCUGACCC | 10450 |
| 10_1 | | | | 54633971 | AGC | |
| 10859_ | LILRB1 | EXON | + | chr19: 54633959- | UCCUGACCCAGCAGGCC | 10451 |
| 10_4 | | | | 54633979 | CUG | |
| 10859_ | LILRB1 | EXON | + | chr19: 54633981- | GACCAGCCCCUCACCCC | 10452 |
| 10_6 | | | | 54634001 | CAC | |
| 10859_ | LILRB1 | EXON | + | chr19: 54633982- | ACCAGCCCCUCACCCCC | 10453 |
| 10_7 | | | | 54634002 | ACC | |
| 10859_ | LILRB1 | EXON | + | chr19: 54633986- | GCCCCUCACCCCCACCG | 10454 |
| 10_9 | | | | 54634006 | GGU | |
| 10859_ | LILRB1 | EXON | + | chr19: 54633999- | ACCGGGUCGGAUCCCCA | 10455 |
| 10_11 | | | | 54634019 | GAG | |
| 10859_ | LILRB1 | EXON | + | chr19: 54634009- | AUCCCCAGAGUGGUGAG | 10456 |
| 10_14 | | | | 54634029 | UGA | |
| 10859_ | LILRB1 | EXON | + | chr19: 54634010- | UCCCCAGAGUGGUGAGU | 10457 |
| 10_15 | | | | 54634030 | GAC | |
| 10859_ | LILRB1 | EXON | + | chr19: 54634020- | GGUGAGUGACGGGCUC | 10458 |
| 10_18 | | | | 54634040 | UGAG | |
| 10859_ | LILRB1 | EXON | + | chr19: 54634021- | GUGAGUGACGGGCUCU | 10459 |
| 10_21 | | | | 54634041 | GAGU | |
| 10859_ | LILRB1 | EXON | + | chr19: 54634024- | AGUGACGGGCUCUGAG | 10460 |
| 10_22 | | | | 54634044 | UGGG | |
| 10859_ | LILRB1 | EXON | + | chr19: 54634027- | GACGGGCUCUGAGUGG | 10461 |
| 10_24 | | | | 54634047 | GAGG | |
| 10859_ | LILRB1 | EXON | + | chr19: 54634028- | ACGGGCUCUGAGUGGG | 10462 |
| 10_25 | | | | 54634048 | AGGU | |
| 10859_ | LILRB1 | EXON | + | chr19: 54634032- | GCUCUGAGUGGGAGGU | 10463 |
| 10_27 | | | | 54634052 | GGGC | |
| 10859_ | LILRB1 | EXON | + | chr19: 54634033- | CUCUGAGUGGGAGGUG | 10464 |
| 10_28 | | | | 54634053 | GGCA | |
| 10859_ | LILRB1 | EXON | − | chr19: 54633954- | CCUGCUGGGUCAGGACG | 10465 |
| 10_29 | | | | 54633974 | GGG | |
| 10859_ | LILRB1 | EXON | − | chr19: 54633957- | GGGCCUGCUGGGUCAGG | 10466 |
| 10_30 | | | | 54633977 | ACG | |
| 10859_ | LILRB1 | EXON | − | chr19: 54633958- | AGGGCCUGCUGGGUCAG | 10467 |
| 10_32 | | | | 54633978 | GAC | |
| 10859_ | LILRB1 | EXON | − | chr19: 54633959- | CAGGGCCUGCUGGGUCA | 10468 |
| 10_34 | | | | 54633979 | GGA | |
| 10859_ | LILRB1 | EXON | − | chr19: 54633963- | UCCUCAGGGCCUGCUGG | 10469 |
| 10_37 | | | | 54633983 | GUC | |
| 10859_ | LILRB1 | EXON | − | chr19: 54633968- | GCUGGUCCUCAGGGCCU | 10470 |
| 10_39 | | | | 54633988 | GCU | |
| 10859_ | LILRB1 | EXON | − | chr19: 54633969- | GGCUGGUCCUCAGGGCC | 10471 |
| 10_40 | | | | 54633989 | UGC | |
| 10859_ | LILRB1 | EXON | − | chr19: 54633977- | GGGUGAGGGGCUGGUC | 10472 |
| 10_42 | | | | 54633997 | CUCA | |
| 10859_ | LILRB1 | EXON | − | chr19: 54633978- | GGGGUGAGGGGCUGGU | 10473 |
| 10_43 | | | | 54633998 | CCUC | |
| 10859_ | LILRB1 | EXON | − | chr19: 54633986- | ACCCGGUGGGGGUGAG | 10474 |
| 10_45 | | | | 54634006 | GGGC | |
| 10859_ | LILRB1 | EXON | − | chr19: 54633990- | UCCGACCCGGUGGGGGU | 10475 |
| 10_46 | | | | 54634010 | GAG | |
| 10859_ | LILRB1 | EXON | − | chr19: 54633991- | AUCCGACCCGGUGGGGG | 10476 |
| 10_47 | | | | 54634011 | UGA | |
| 10859_ | LILRB1 | EXON | − | chr19: 54633992- | GAUCCGACCCGGUGGGG | 10477 |
| 10_48 | | | | 54634012 | GUG | |
| 10859_ | LILRB1 | EXON | − | chr19: 54633997- | CUGGGGAUCCGACCCGG | 10478 |
| 10_52 | | | | 54634017 | UGG | |
| 10859_ | LILRB1 | EXON | − | chr19: 54633998- | UCUGGGGAUCCGACCCG | 10479 |
| 10_53 | | | | 54634018 | GUG | |
| 10859_ | LILRB1 | EXON | − | chr19: 54633999- | CUCUGGGGAUCCGACCC | 10480 |
| 10_55 | | | | 54634019 | GGU | |
| 10859_ | LILRB1 | EXON | − | chr19: 54634000- | ACUCUGGGGAUCCGACC | 10481 |
| 10_57 | | | | 54634020 | CGG | |
| 10859_ | LILRB1 | EXON | − | chr19: 54634003- | ACCACUCUGGGGAUCCG | 10482 |
| 10_59 | | | | 54634023 | ACC | |
| 10859_ | LILRB1 | EXON | − | chr19: 54634014- | GCCCGUCACUCACCACU | 10483 |
| 10_60 | | | | 54634034 | CUG | |
| 10859_ | LILRB1 | EXON | − | chr19: 54634015- | AGCCCGUCACUCACCAC | 10484 |
| 10_62 | | | | 54634035 | UCU | |
| 10859_ | LILRB1 | EXON | − | chr19: 54634016- | GAGCCCGUCACUCACCA | 10485 |
| 10_64 | | | | 54634036 | CUC | |
| 10859_ | LILRB1 | EXON | − | chr19: 54634060- | CUUGGGUGGGGACGGA | 10486 |
| 10_67 | | | | 54634080 | GGGC | |
| 10859_ | LILRB1 | EXON | + | chr19: 54634623- | ACAUCAUCGUGCUCAAG | 10487 |
| 11 2 | | | | 54634643 | GUC | |
| 10859_ | LILRB1 | EXON | + | chr19: 54634624- | CAUCAUCGUGCUCAAGG | 10488 |
| 11 4 | | | | 54634644 | UCU | |
| 10859_ | LILRB1 | EXON | + | chr19: 54634628- | AUCGUGCUCAAGGUCUG | 10489 |
| 11 6 | | | | 54634648 | GGA | |
| 10859_ | LILRB1 | EXON | + | chr19: 54634635- | UCAAGGUCUGGGAAGG | 10490 |
| 11 9 | | | | 54634655 | CACC | |
| 10859_ | LILRB1 | EXON | + | chr19: 54634636- | CAAGGUCUGGGAAGGC | 10491 |
| 11 11 | | | | 54634656 | ACCU | |
| 10859_ | LILRB1 | EXON | + | chr19: 54634637- | AAGGUCUGGGAAGGCA | 10492 |
| 11 12 | | | | 54634657 | CCUG | |
| 10859_ | LILRB1 | EXON | + | chr19: 54634638- | AGGUCUGGGAAGGCACC | 10493 |
| 11 13 | | | | 54634658 | UGG | |
| 10859_ | LILRB1 | EXON | + | chr19: 54634648- | AGGCACCUGGGGGUUG | 10494 |
| 11 14 | | | | 54634668 | UGAU | |
| 10859_ | LILRB1 | EXON | + | chr19: 54634656- | GGGGGUUGUGAUCGGC | 10495 |
| 11 15 | | | | 54634676 | AUCU | |
| 10859_ | LILRB1 | EXON | + | chr19: 54634659- | GGUUGUGAUCGGCAUC | 10496 |
| 11 16 | | | | 54634679 | UUGG | |
| 10859_ | LILRB1 | EXON | + | chr19: 54634722- | CAUCCUCCGACAUCGAC | 10497 |
| 11 20 | | | | 54634742 | GUC | |
| 10859_ | LILRB1 | EXON | + | chr19: 54634723- | AUCCUCCGACAUCGACG | 10498 |
| 11 21 | | | | 54634743 | UCA | |
| 10859_ | LILRB1 | EXON | + | chr19: 54634733- | AUCGACGUCAGGGCAAA | 10499 |
| 11 23 | | | | 54634753 | CAC | |
| 10859_ | LILRB1 | EXON | + | chr19: 54634749- | ACACUGGACAUCGAGUG | 10500 |
| 11 28 | | | | 54634769 | AGU | |
| 10859_ | LILRB1 | EXON | + | chr19: 54634750- | CACUGGACAUCGAGUGA | 10501 |
| 11 29 | | | | 54634770 | GUA | |
| 10859_ | LILRB1 | EXON | + | chr19: 54634755- | GACAUCGAGUGAGUAG | 10502 |
| 11 32 | | | | 54634775 | GGAA | |
| 10859_ | LILRB1 | EXON | + | chr19: 54634756- | ACAUCGAGUGAGUAGG | 10503 |
| 11 35 | | | | 54634776 | GAAU | |
| 10859_ | LILRB1 | EXON | + | chr19: 54634757- | CAUCGAGUGAGUAGGG | 10504 |
| 11 36 | | | | 54634777 | AAUG | |
| 10859_ | LILRB1 | EXON | + | chr19: 54634758- | AUCGAGUGAGUAGGGA | 10505 |
| 11 38 | | | | 54634778 | AUGG | |
| 10859_ | LILRB1 | EXON | + | chr19: 54634759- | UCGAGUGAGUAGGGAA | 10506 |
| 11 40 | | | | 54634779 | UGGG | |
| 10859_ | LILRB1 | EXON | − | chr19: 54634656- | AGAUGCCGAUCACAACC | 10507 |
| 11 43 | | | | 54634676 | CCC | |
| 10859_ | LILRB1 | EXON | − | chr19: 54634685- | CUCCUCCUCCAGUAGGA | 10508 |
| 11 44 | | | | 54634705 | UGA | |
| 10859_ | LILRB1 | EXON | − | chr19: 54634692- | CCUCCUCCUCCUCCUCC | 10509 |
| 11 45 | | | | 54634712 | AGU | |
| 10859_ | LILRB1 | EXON | + | chr19: 54635092- | UCUUCCCCCAGCCCAGA | 10510 |
| 12_4 | | | | 54635112 | GAA | |
| 10859_ | LILRB1 | EXON | + | chr19: 54635114- | GCUGAUUUCCAACAUCC | 10511 |
| 12_8 | | | | 54635134 | UGC | |
| 10859_ | LILRB1 | EXON | + | chr19: 54635115- | CUGAUUUCCAACAUCCU | 10512 |
| 12_10 | | | | 54635135 | GCA | |
| 10859_ | LILRB1 | EXON | + | chr19: 54635116- | UGAUUUCCAACAUCCUG | 10513 |
| 12_11 | | | | 54635136 | CAG | |
| 10859_ | LILRB1 | EXON | + | chr19: 54635122- | CCAACAUCCUGCAGGGG | 10514 |
| 12_15 | | | | 54635142 | CUG | |
| 10859_ | LILRB1 | EXON | + | chr19: 54635123- | CAACAUCCUGCAGGGGC | 10515 |
| 12_16 | | | | 54635143 | UGU | |
| 10859_ | LILRB1 | EXON | + | chr19: 54635124- | AACAUCCUGCAGGGGCU | 10516 |
| 12_18 | | | | 54635144 | GUG | |
| 10859_ | LILRB1 | EXON | + | chr19: 54635144- | GGGCCAGAGCCCACAGA | 10517 |
| 12_21 | | | | 54635164 | CAG | |
| 10859_ | LILRB1 | EXON | + | chr19: 54635154- | CCACAGACAGAGGCCUG | 10518 |
| 12_24 | | | | 54635174 | CAG | |
| 10859_ | LILRB1 | EXON | + | chr19: 54635157- | CAGACAGAGGCCUGCAG | 10519 |
| 12_25 | | | | 54635177 | UGG | |
| 10859_ | LILRB1 | EXON | − | chr19: 54635092- | UUCUCUGGGCUGGGGG | 10520 |
| 12_30 | | | | 54635112 | AAGA | |
| 10859_ | LILRB1 | EXON | − | chr19: 54635099- | UCAGCCUUUCUCUGGGC | 10521 |
| 12_35 | | | | 54635119 | UGG | |
| 10859_ | LILRB1 | EXON | − | chr19: 54635100- | AUCAGCCUUUCUCUGGG | 10522 |
| 12_37 | | | | 54635120 | CUG | |
| 10859_ | LILRB1 | EXON | − | chr19: 54635101- | AAUCAGCCUUUCUCUGG | 10523 |
| 12_40 | | | | 54635121 | GCU | |
| 10859_ | LILRB1 | EXON | − | chr19: 54635102- | AAAUCAGCCUUUCUCUG | 10524 |
| 12_42 | | | | 54635122 | GGC | |
| 10859_ | LILRB1 | EXON | − | chr19: 54635106- | UUGGAAAUCAGCCUUUC | 10525 |
| 12_44 | | | | 54635126 | UCU | |
| 10859_ | LILRB1 | EXON | − | chr19: 54635107- | GUUGGAAAUCAGCCUU | 10526 |
| 12_45 | | | | 54635127 | UCUC | |
| 10859_ | LILRB1 | EXON | − | chr19: 54635125- | CCACAGCCCCUGCAGGA | 10527 |
| 12_48 | | | | 54635145 | UGU | |
| 10859_ | LILRB1 | EXON | − | chr19: 54635132- | UCUGGCCCCACAGCCCC | 10528 |
| 12_50 | | | | 54635152 | UGC | |
| 10859_ | LILRB1 | EXON | − | chr19: 54635150- | AGGCCUCUGUCUGUGGG | 10529 |
| 12_52 | | | | 54635170 | CUC | |
| 10859_ | LILRB1 | EXON | − | chr19: 54635156- | CACUGCAGGCCUCUGUC | 10530 |
| 12_53 | | | | 54635176 | UGU | |
| 10859_ | LILRB1 | EXON | − | chr19: 54635157- | CCACUGCAGGCCUCUGU | 10531 |
| 12_55 | | | | 54635177 | CUG | |
| 10859_ | LILRB1 | EXON | − | chr19: 54635170- | GGCAGAAUUACCUCCAC | 10532 |
| 12_58 | | | | 54635190 | UGC | |
| 10859_ | LILRB1 | EXON | + | chr19: 54635261- | CAGCCCAGCUGCCGAUG | 10533 |
| 13_5 | | | | 54635281 | CCC | |
| 10859_ | LILRB1 | EXON | + | chr19: 54635285- | AGAAAACCUCUGUGAG | 10534 |
| 13_13 | | | | 54635305 | UGAG | |
| 10859_ | LILRB1 | EXON | + | chr19: 54635291- | CCUCUGUGAGUGAGAG | 10535 |
| 13_15 | | | | 54635311 | GAAG | |
| 10859_ | LILRB1 | EXON | − | chr19: 54635245- | GCUGGACCUGGGGGAA | 10536 |
| 13_16 | | | | 54635265 | GAAU | |
| 10859_ | LILRB1 | EXON | − | chr19: 54635246- | GGCUGGACCUGGGGGA | 10537 |
| 13_19 | | | | 54635266 | AGAA | |
| 10859_ | LILRB1 | EXON | − | chr19: 54635254- | GGCAGCUGGGCUGGACC | 10538 |
| 13_23 | | | | 54635274 | UGG | |
| 10859_ | LILRB1 | EXON | − | chr19: 54635255- | CGGCAGCUGGGCUGGAC | 10539 |
| 13_25 | | | | 54635275 | CUG | |
| 10859_ | LILRB1 | EXON | − | chr19: 54635256- | UCGGCAGCUGGGCUGGA | 10540 |
| 13_27 | | | | 54635276 | CCU | |
| 10859_ | LILRB1 | EXON | − | chr19: 54635257- | AUCGGCAGCUGGGCUGG | 10541 |
| 13_28 | | | | 54635277 | ACC | |
| 10859_ | LILRB1 | EXON | − | chr19: 54635263- | CUGGGCAUCGGCAGCUG | 10542 |
| 13_33 | | | | 54635283 | GGC | |
| 10859_ | LILRB1 | EXON | − | chr19: 54635267- | CUUCCUGGGCAUCGGCA | 10543 |
| 13_37 | | | | 54635287 | GCU | |
| 10859_ | LILRB1 | EXON | − | chr19: 54635268- | UCUUCCUGGGCAUCGGC | 10544 |
| 13_38 | | | | 54635288 | AGC | |
| 10859_ | LILRB1 | EXON | − | chr19: 54635275- | GAGGUUUUCUUCCUGG | 10545 |
| 13_40 | | | | 54635295 | GCAU | |
| 10859_ | LILRB1 | EXON | − | chr19: 54635281- | CUCACAGAGGUUUUCUU | 10546 |
| 13_41 | | | | 54635301 | CCU | |
| 10859_ | LILRB1 | EXON | − | chr19: 54635282- | ACUCACAGAGGUUUUCU | 10547 |
| 13_42 | | | | 54635302 | UCC | |
| 10859_ | LILRB1 | EXON | − | chr19: 54635294- | CCUCUUCCUCUCACUCA | 10548 |
| 13_45 | | | | 54635314 | CAG | |
| 10859_ | LILRB1 | EXON | + | chr19: 54635563- | CGUGAAGCACACACAGC | 10549 |
| 14_5 | | | | 54635583 | CUG | |
| 10859_ | LILRB1 | EXON | + | chr19: 54635567- | AAGCACACACAGCCUGA | 10550 |
| 14_7 | | | | 54635587 | GGA | |
| 10859_ | LILRB1 | EXON | + | chr19: 54635568- | AGCACACACAGCCUGAG | 10551 |
| 14_9 | | | | 54635588 | GAU | |
| 10859_ | LILRB1 | EXON | + | chr19: 54635569- | GCACACACAGCCUGAGG | 10552 |
| 14_10 | | | | 54635589 | AUG | |
| 10859_ | LILRB1 | EXON | + | chr19: 54635572- | CACACAGCCUGAGGAUG | 10553 |
| 14_12 | | | | 54635592 | GGG | |
| 10859_ | LILRB1 | EXON | + | chr19: 54635578- | GCCUGAGGAUGGGGUG | 10554 |
| 14_15 | | | | 54635598 | GAGA | |
| 10859_ | LILRB1 | EXON | + | chr19: 54635586- | AUGGGGUGGAGAUGGA | 10555 |
| 14_17 | | | | 54635606 | CACU | |
| 10859_ | LILRB1 | EXON | + | chr19: 54635587- | UGGGGUGGAGAUGGAC | 10556 |
| 14_18 | | | | 54635607 | ACUC | |
| 10859_ | LILRB1 | EXON | − | chr19: 54635539- | CAUCUGCUGGGGCAGAG | 10557 |
| 14_20 | | | | 54635559 | CAA | |
| 10859_ | LILRB1 | EXON | − | chr19: 54635540- | GCAUCUGCUGGGGCAGA | 10558 |
| 14_21 | | | | 54635560 | GCA | |
| 10859_ | LILRB1 | EXON | − | chr19: 54635550- | CUUCACGGCAGCAUCUG | 10559 |
| 14_25 | | | | 54635570 | CUG | |
| 10859_ | LILRB1 | EXON | − | chr19: 54635551- | GCUUCACGGCAGCAUCU | 10560 |
| 14_26 | | | | 54635571 | GCU | |
| 10859_ | LILRB1 | EXON | − | chr19: 54635552- | UGCUUCACGGCAGCAUC | 10561 |
| 14_28 | | | | 54635572 | UGC | |
| 10859_ | LILRB1 | EXON | − | chr19: 54635565- | CUCAGGCUGUGUGUGCU | 10562 |
| 14_30 | | | | 54635585 | UCA | |
| 10859_ | LILRB1 | EXON | − | chr19: 54635582- | UCCAUCUCCACCCCAUC | 10563 |
| 14_31 | | | | 54635602 | CUC | |
| 10859_ | LILRB1 | EXON | + | chr19: 54636498- | CCCACACGAUGAAGACC | 10564 |
| 15_3 | | | | 54636518 | CCC | |
| 10859_ | LILRB1 | EXON | + | chr19: 54636516- | CCAGGCAGUGACGUAUG | 10565 |
| 15_5 | | | | 54636536 | CCG | |
| 10859_ | LILRB1 | EXON | + | chr19: 54636536- | AGGUGAAACACUCCAGA | 10566 |
| 15_8 | | | | 54636556 | CCU | |
| 10859_ | LILRB1 | EXON | + | chr19: 54636546- | CUCCAGACCUAGGAGAG | 10567 |
| 15_13 | | | | 54636566 | AAA | |
| 10859_ | LILRB1 | EXON | + | chr19: 54636571- | UCUCCUCCUUCCCCACU | 10568 |
| 15_15 | | | | 54636591 | GUC | |
| 10859_ | LILRB1 | EXON | + | chr19: 54636572- | CUCCUCCUUCCCCACUG | 10569 |
| 15_17 | | | | 54636592 | UCU | |
| 10859_ | LILRB1 | EXON | + | chr19: 54636573- | UCCUCCUUCCCCACUGU | 10570 |
| 15_20 | | | | 54636593 | CUG | |
| 10859_ | LILRB1 | EXON | + | chr19: 54636582- | CCCACUGUCUGGGGAAU | 10571 |
| 15_23 | | | | 54636602 | UCC | |
| 10859_ | LILRB1 | EXON | + | chr19: 54636591- | UGGGGAAUUCCUGGAC | 10572 |
| 15_25 | | | | 54636611 | ACAA | |
| 10859_ | LILRB1 | EXON | + | chr19: 54636600- | CCUGGACACAAAGGACA | 10573 |
| 15_26 | | | | 54636620 | GAC | |
| 10859_ | LILRB1 | EXON | + | chr19: 54636603- | GGACACAAAGGACAGAC | 10574 |
| 15_29 | | | | 54636623 | AGG | |
| 10859_ | LILRB1 | EXON | + | chr19: 54636609- | AAAGGACAGACAGGCG | 10575 |
| 15_33 | | | | 54636629 | GAAG | |
| 10859_ | LILRB1 | EXON | + | chr19: 54636614- | ACAGACAGGCGGAAGA | 10576 |
| 15_34 | | | | 54636634 | GGAC | |
| 10859_ | LILRB1 | EXON | + | chr19: 54636621- | GGCGGAAGAGGACAGG | 10577 |
| 15_36 | | | | 54636641 | CAGA | |
| 10859_ | LILRB1 | EXON | + | chr19: 54636630- | GGACAGGCAGAUGGAC | 10578 |
| 15_38 | | | | 54636650 | ACUG | |
| 10859_ | LILRB1 | EXON | − | chr19: 54636476- | CUGCUGGAGAGAGACA | 10579 |
| 15_40 | | | | 54636496 | GUGG | |
| 10859_ | LILRB1 | EXON | − | chr19: 54636479- | GCUCUGCUGGAGAGAG | 10580 |
| 15_41 | | | | 54636499 | ACAG | |
| 10859_ | LILRB1 | EXON | − | chr19: 54636492- | CUUCAUCGUGUGGGCUC | 10581 |
| 15_46 | | | | 54636512 | UGC | |
| 10859_ | LILRB1 | EXON | − | chr19: 54636501- | CCUGGGGGUCUUCAUCG | 10582 |
| 15_48 | | | | 54636521 | UGU | |
| 10859_ | LILRB1 | EXON | − | chr19: 54636502- | GCCUGGGGGUCUUCAUC | 10583 |
| 15_49 | | | | 54636522 | GUG | |
| 10859_ | LILRB1 | EXON | − | chr19: 54636516- | CGGCAUACGUCACUGCC | 10584 |
| 15_51 | | | | 54636536 | UGG | |
| 10859_ | LILRB1 | EXON | − | chr19: 54636517- | UCGGCAUACGUCACUGC | 10585 |
| 15_52 | | | | 54636537 | CUG | |
| 10859_ | LILRB1 | EXON | − | chr19: 54636518- | CUCGGCAUACGUCACUG | 10586 |
| 15_55 | | | | 54636538 | CCU | |
| 10859_ | LILRB1 | EXON | − | chr19: 54636519- | CCUCGGCAUACGUCACU | 10587 |
| 15_58 | | | | 54636539 | GCC | |
| 10859_ | LILRB1 | EXON | − | chr19: 54636536- | AGGUCUGGAGUGUUUC | 10588 |
| 15_60 | | | | 54636556 | ACCU | |
| 10859_ | LILRB1 | EXON | − | chr19: 54636551- | GGCCAUUUCUCUCCUAG | 10589 |
| 15_63 | | | | 54636571 | GUC | |
| 10859_ | LILRB1 | EXON | − | chr19: 54636556- | GGAGAGGCCAUUUCUCU | 10590 |
| 15_66 | | | | 54636576 | CCU | |
| 10859_ | LILRB1 | EXON | − | chr19: 54636572- | AGACAGUGGGGAAGGA | 10591 |
| 15_68 | | | | 54636592 | GGAG | |
| 10859_ | LILRB1 | EXON | − | chr19: 54636577- | UCCCCAGACAGUGGGGA | 10592 |
| 15_70 | | | | 54636597 | AGG | |
| 10859_ | LILRB1 | EXON | − | chr19: 54636580- | AAUUCCCCAGACAGUGG | 10593 |
| 15_74 | | | | 54636600 | GGA | |
| 10859_ | LILRB1 | EXON | − | chr19: 54636584- | CAGGAAUUCCCCAGACA | 10594 |
| 15_76 | | | | 54636604 | GUG | |
| 10859_ | LILRB1 | EXON | − | chr19: 54636585- | CCAGGAAUUCCCCAGAC | 10595 |
| 15_80 | | | | 54636605 | AGU | |
| 10859_ | LILRB1 | EXON | − | chr19: 54636586- | UCCAGGAAUUCCCCAGA | 10596 |
| 15_82 | | | | 54636606 | CAG | |
| 10859_ | LILRB1 | EXON | − | chr19: 54636603- | CCUGUCUGUCCUUUGUG | 10597 |
| 15_87 | | | | 54636623 | UCC | |
| 10859_ | LILRB1 | EXON | + | chr19: 54636733- | UGCUGCAUCUGAAGCCC | 10598 |
| 16_3 | | | | 54636753 | CCC | |
| 10859_ | LILRB1 | EXON | + | chr19: 54636774- | UGCACAGCUUGACCCUC | 10599 |
| 16_6 | | | | 54636794 | AGA | |
| 10859_ | LILRB1 | EXON | + | chr19: 54636775- | GCACAGCUUGACCCUCA | 10600 |
| 16_7 | | | | 54636795 | GAC | |
| 10859_ | LILRB1 | EXON | + | chr19: 54636778- | CAGCUUGACCCUCAGAC | 10601 |
| 16_9 | | | | 54636798 | GGG | |
| 10859_ | LILRB1 | EXON | + | chr19: 54636802- | AACUGAGCCUCCUCCAU | 10602 |
| 16_14 | | | | 54636822 | CCC | |
| 10859_ | LILRB1 | EXON | + | chr19: 54636806- | GAGCCUCCUCCAUCCCA | 10603 |
| 16_16 | | | | 54636826 | GGA | |
| 10859_ | LILRB1 | EXON | + | chr19: 54636807- | AGCCUCCUCCAUCCCAG | 10604 |
| 16_17 | | | | 54636827 | GAA | |
| 10859_ | LILRB1 | EXON | + | chr19: 54636844- | GCCCAGCAUCUACGCCA | 10605 |
| 16_18 | | | | 54636864 | CUC | |
| 10859_ | LILRB1 | EXON | + | chr19: 54636861- | CUCUGGCCAUCCACUAG | 10606 |
| 16_21 | | | | 54636881 | CCC | |
| 10859_ | LILRB1 | EXON | + | chr19: 54636862- | UCUGGCCAUCCACUAGC | 10607 |
| 16_22 | | | | 54636882 | CCA | |
| 10859_ | LILRB1 | EXON | + | chr19: 54636863- | CUGGCCAUCCACUAGCC | 10608 |
| 16_25 | | | | 54636883 | CAG | |
| 10859_ | LILRB1 | EXON | + | chr19: 54636864- | UGGCCAUCCACUAGCCC | 10609 |
| 16_27 | | | | 54636884 | AGG | |
| 10859_ | LILRB1 | EXON | + | chr19: 54636865- | GGCCAUCCACUAGCCCA | 10610 |
| 16_28 | | | | 54636885 | GGG | |
| 10859_ | LILRB1 | EXON | + | chr19: 54636866- | GCCAUCCACUAGCCCAG | 10611 |
| 16_30 | | | | 54636886 | GGG | |
| 10859_ | LILRB1 | EXON | + | chr19: 54636888- | GACGCAGACCCCACACU | 10612 |
| 16_32 | | | | 54636908 | CCA | |
| 10859_ | LILRB1 | EXON | + | chr19: 54636895- | ACCCCACACUCCAUGGA | 10613 |
| 16_35 | | | | 54636915 | GUC | |
| 10859_ | LILRB1 | EXON | + | chr19: 54636904- | UCCAUGGAGUCUGGAA | 10614 |
| 16_38 | | | | 54636924 | UGCA | |
| 10859_ | LILRB1 | EXON | + | chr19: 54636905- | CCAUGGAGUCUGGAAU | 10615 |
| 16_40 | | | | 54636925 | GCAU | |
| 10859_ | LILRB1 | EXON | + | chr19: 54636922- | CAUGGGAGCUGCCCCCC | 10616 |
| 16_43 | | | | 54636942 | CAG | |
| 10859_ | LILRB1 | EXON | + | chr19: 54636932- | GCCCCCCCAGUGGACAC | 10617 |
| 16_45 | | | | 54636952 | CAU | |
| 10859_ | LILRB1 | EXON | + | chr19: 54636948- | CCAUUGGACCCCACCCA | 10618 |
| 16_47 | | | | 54636968 | GCC | |
| 10859_ | LILRB1 | EXON | + | chr19: 54636960- | ACCCAGCCUGGAUCUAC | 10619 |
| 16_50 | | | | 54636980 | CCC | |
| 10859_ | LILRB1 | EXON | + | chr19: 54636969- | GGAUCUACCCCAGGAGA | 10620 |
| 16_54 | | | | 54636989 | CUC | |
| 10859_ | LILRB1 | EXON | + | chr19: 54636970- | GAUCUACCCCAGGAGAC | 10621 |
| 16_55 | | | | 54636990 | UCU | |
| 10859_ | LILRB1 | EXON | + | chr19: 54636980- | AGGAGACUCUGGGAAC | 10622 |
| 16_58 | | | | 54637000 | UUUU | |
| 10859_ | LILRB1 | EXON | + | chr19: 54636981- | GGAGACUCUGGGAACU | 10623 |
| 16_60 | | | | 54637001 | UUUA | |
| 10859_ | LILRB1 | EXON | + | chr19: 54636982- | GAGACUCUGGGAACUU | 10624 |
| 16_61 | | | | 54637002 | UUAG | |
| 10859_ | LILRB1 | EXON | − | chr19: 54636722- | GAUGCAGCAGCCUGCAG | 10625 |
| 16_70 | | | | 54636742 | CGG | |
| 10859_ | LILRB1 | EXON | − | chr19: 54636723- | AGAUGCAGCAGCCUGCA | 10626 |
| 16_72 | | | | 54636743 | GCG | |
| 10859_ | LILRB1 | EXON | − | chr19: 54636724- | CAGAUGCAGCAGCCUGC | 10627 |
| 16_74 | | | | 54636744 | AGC | |
| 10859_ | LILRB1 | EXON | − | chr19: 54636725- | UCAGAUGCAGCAGCCUG | 10628 |
| 16_75 | | | | 54636745 | CAG | |
| 10859_ | LILRB1 | EXON | − | chr19: 54636750- | GGCGUAGGUCACAUCCU | 10629 |
| 16_78 | | | | 54636770 | GGG | |
| 10859_ | LILRB1 | EXON | − | chr19: 54636751- | GGGCGUAGGUCACAUCC | 10630 |
| 16_79 | | | | 54636771 | UGG | |
| 10859_ | LILRB1 | EXON | − | chr19: 54636752- | UGGGCGUAGGUCACAUC | 10631 |
| 16_81 | | | | 54636772 | CUG | |
| 10859_ | LILRB1 | EXON | − | chr19: 54636753- | CUGGGCGUAGGUCACAU | 10632 |
| 16_83 | | | | 54636773 | CCU | |
| 10859_ | LILRB1 | EXON | − | chr19: 54636754- | GCUGGGCGUAGGUCACA | 10633 |
| 16_84 | | | | 54636774 | UCC | |
| 10859_ | LILRB1 | EXON | − | chr19: 54636765- | CAAGCUGUGCAGCUGGG | 10634 |
| 16_87 | | | | 54636785 | CGU | |
| 10859_ | LILRB1 | EXON | − | chr19: 54636771- | GAGGGUCAAGCUGUGC | 10635 |
| 16_88 | | | | 54636791 | AGCU | |
| 10859_ | LILRB1 | EXON | − | chr19: 54636772- | UGAGGGUCAAGCUGUG | 10636 |
| 16_89 | | | | 54636792 | CAGC | |
| 10859_ | LILRB1 | EXON | − | chr19: 54636789- | CUCAGUUGCCUCCCGUC | 10637 |
| 16_92 | | | | 54636809 | UGA | |
| 10859_ | LILRB1 | EXON | − | chr19: 54636790- | GCUCAGUUGCCUCCCGU | 10638 |
| 16_93 | | | | 54636810 | CUG | |
| 10859_ | LILRB1 | EXON | − | chr19: 54636812- | GGCCCUUCCUGGGAUGG | 10639 |
| 16_97 | | | | 54636832 | AGG | |
| 10859_ | LILRB1 | EXON | − | chr19: 54636815- | GAGGGCCCUUCCUGGGA | 10640 |
| 16_98 | | | | 54636835 | UGG | |
| 10859_ | LILRB1 | EXON | − | chr19: 54636818- | GGAGAGGGCCCUUCCUG | 10641 |
| 16_101 | | | | 54636838 | GGA | |
| 10859_ | LILRB1 | EXON | − | chr19: 54636822- | AGCUGGAGAGGGCCCUU | 10642 |
| 16_104 | | | | 54636842 | CCU | |
| 10859_ | LILRB1 | EXON | − | chr19: 54636823- | CAGCUGGAGAGGGCCCU | 10643 |
| 16_105 | | | | 54636843 | UCC | |
| 10859_ | LILRB1 | EXON | − | chr19: 54636833- | AUGCUGGGCACAGCUGG | 10644 |
| 16_108 | | | | 54636853 | AGA | |
| 10859_ | LILRB1 | EXON | − | chr19: 54636834- | GAUGCUGGGCACAGCUG | 10645 |
| 16_109 | | | | 54636854 | GAG | |
| 10859_ | LILRB1 | EXON | − | chr19: 54636839- | GCGUAGAUGCUGGGCAC | 10646 |
| 16_112 | | | | 54636859 | AGC | |
| 10859_ | LILRB1 | EXON | − | chr19: 54636848- | GCCAGAGUGGCGUAGA | 10647 |
| 16_115 | | | | 54636868 | UGCU | |
| 10859_ | LILRB1 | EXON | − | chr19: 54636849- | GGCCAGAGUGGCGUAG | 10648 |
| 16_116 | | | | 54636869 | AUGC | |
| 10859_ | LILRB1 | EXON | − | chr19: 54636861- | GGGCUAGUGGAUGGCC | 10649 |
| 16_118 | | | | 54636881 | AGAG | |
| 10859_ | LILRB1 | EXON | − | chr19: 54636870- | UCCCCCCCUGGGCUAGU | 10650 |
| 16_120 | | | | 54636890 | GGA | |
| 10859_ | LILRB1 | EXON | − | chr19: 54636874- | UGCGUCCCCCCCUGGGC | 10651 |
| 16_121 | | | | 54636894 | UAG | |
| 10859_ | LILRB1 | EXON | − | chr19: 54636881- | UGGGGUCUGCGUCCCCC | 10652 |
| 16_123 | | | | 54636901 | CCU | |
| 10859_ | LILRB1 | EXON | − | chr19: 54636882- | GUGGGGUCUGCGUCCCC | 10653 |
| 16_124 | | | | 54636902 | CCC | |
| 10859_ | LILRB1 | EXON | − | chr19: 54636899- | UCCAGACUCCAUGGAGU | 10654 |
| 16_127 | | | | 54636919 | GUG | |
| 10859_ | LILRB1 | EXON | − | chr19: 54636900- | UUCCAGACUCCAUGGAG | 10655 |
| 16_128 | | | | 54636920 | UGU | |
| 10859_ | LILRB1 | EXON | − | chr19: 54636901- | AUUCCAGACUCCAUGGA | 10656 |
| 16_129 | | | | 54636921 | GUG | |
| 10859_ | LILRB1 | EXON | − | chr19: 54636908- | CCCAUGCAUUCCAGACU | 10657 |
| 16_132 | | | | 54636928 | CCA | |
| 10859_ | LILRB1 | EXON | − | chr19: 54636936- | UCCAAUGGUGUCCACUG | 10658 |
| 16_135 | | | | 54636956 | GGG | |
| 10859_ | LILRB1 | EXON | − | chr19: 54636937- | GUCCAAUGGUGUCCACU | 10659 |
| 16_136 | | | | 54636957 | GGG | |
| 10859_ | LILRB1 | EXON | − | chr19: 54636938- | GGUCCAAUGGUGUCCAC | 10660 |
| 16_137 | | | | 54636958 | UGG | |
| 10859_ | LILRB1 | EXON | − | chr19: 54636939- | GGGUCCAAUGGUGUCCA | 10661 |
| 16_139 | | | | 54636959 | CUG | |
| 10859_ | LILRB1 | EXON | − | chr19: 54636940- | GGGGUCCAAUGGUGUCC | 10662 |
| 16_141 | | | | 54636960 | ACU | |
| 10859_ | LILRB1 | EXON | − | chr19: 54636941- | UGGGGUCCAAUGGUGU | 10663 |
| 16_143 | | | | 54636961 | CCAC | |
| 10859_ | LILRB1 | EXON | − | chr19: 54636951- | CCAGGCUGGGUGGGGUC | 10664 |
| 16_146 | | | | 54636971 | CAA | |
| 10859_ | LILRB1 | EXON | − | chr19: 54636959- | GGGUAGAUCCAGGCUG | 10665 |
| 16_147 | | | | 54636979 | GGUG | |
| 10859_ | LILRB1 | EXON | − | chr19: 54636960- | GGGGUAGAUCCAGGCU | 10666 |
| 16_148 | | | | 54636980 | GGGU | |
| 10859_ | LILRB1 | EXON | − | chr19: 54636961- | UGGGGUAGAUCCAGGC | 10667 |
| 16_150 | | | | 54636981 | UGGG | |
| 10859_ | LILRB1 | EXON | − | chr19: 54636964- | UCCUGGGGUAGAUCCAG | 10668 |
| 16_152 | | | | 54636984 | GCU | |
| 10859_ | LILRB1 | EXON | − | chr19: 54636965- | CUCCUGGGGUAGAUCCA | 10669 |
| 16_153 | | | | 54636985 | GGC | |
| 10859_ | LILRB1 | EXON | − | chr19: 54636969- | GAGUCUCCUGGGGUAG | 10670 |
| 16_156 | | | | 54636989 | AUCC | |
| 10859_ | LILRB1 | EXON | − | chr19: 54636979- | AAAGUUCCCAGAGUCUC | 10671 |
| 16_157 | | | | 54636999 | CUG | |
| 10859_ | LILRB1 | EXON | − | chr19: 54636980- | AAAAGUUCCCAGAGUCU | 10672 |
| 16_158 | | | | 54637000 | CCU | |
| 10859_ | LILRB1 | EXON | − | chr19: 54636981- | UAAAAGUUCCCAGAGUC | 10673 |
| 16_159 | | | | 54637001 | UCC | |

TABLE 6e
Exemplary preferred targeting domains for gRNA
molecules targeting CD3E

| Targeting | | Target Sequence | | SEQ ID |
|---|---|---|---|---|
| Domain ID | Strand | Location (hg38) | Targeting domain sequence | NO: |
| CR002230 | + | Chr11:118304702- | AGGCCUCUCUACUUCCUGUG | 10677 |
| | | 118304724 | | |
| CR002231 | + | Chr11:118304703- | GGCCUCUCUACUUCCUGUGU | 10678 |
| | | 118304725 | | |
| CR002232 | + | Chr11:118304704- | GCCUCUCUACUUCCUGUGUG | 10679 |
| | | 118304726 | | |
| CR002233 | − | Chr11:118304570- | GACUCUGACAAUACCUGGAG | 10680 |
| | | 118304592 | | |
| CR002234 | − | Chr11:118304571- | GGACUCUGACAAUACCUGGA | 10681 |
| | | 118304593 | | |
| CR002235 | − | Chr11:118304575- | AAGAGGACUCUGACAAUACC | 10682 |
| | | 118304597 | | |
| CR002236 | − | Chr11:118304592- | UUCCUAGAAGGCCAAACAAG | 10683 |
| | | 118304614 | | |
| CR002237 | − | Chr11:118304604- | GGUCCCACAGCCUUCCUAGA | 10684 |
| | | 118304626 | | |
| CR002238 | − | Chr11:118304625- | UGGACUGGUUGAAGAAAGCU | 10685 |
| | | 118304647 | | |
| CR002239 | − | Chr11:118304640- | GCAGAGGCCUCCACCUGGAC | 10686 |
| | | 118304662 | | |
| CR002240 | − | Chr11:118304656- | CUUGGAAACGUUCAAGGCAG | 10687 |
| | | 118304678 | | |
| CR002241 | − | Chr11:118304662- | ACCUCACUUGGAAACGUUCA | 10688 |
| | | 118304684 | | |
| CR002242 | − | Chr11:118304674- | CCUGCGGGUUUUACCUCACU | 10689 |
| | | 118304696 | | |
| CR002243 | − | Chr11:118304689- | AGAGAGGCCUCUGGGCCUGC | 10690 |
| | | 118304711 | | |
| CR002244 | − | Chr11:118304697- | CAGGAAGUAGAGAGGCCUCU | 10691 |
| | | 118304719 | | |
| CR002245 | − | Chr11:118304705- | ACCCCACACAGGAAGUAGAG | 10692 |
| | | 118304727 | | |
| CR002246 | − | Chr11:118304716- | AGGGUUUCUGAACCCCACAC | 10693 |
| | | 118304738 | | |
| CR002247 | − | Chr11:118304736- | CCUGAGGCUGGGAGGGGAGG | 10694 |
| | | 118304758 | | |
| CR002248 | − | Chr11:118304747- | UGAAGCAGGCACCUGAGGCU | 10695 |
| | | 118304769 | | |
| CR002249 | − | Chr11:118304748- | CUGAAGCAGGCACCUGAGGC | 10696 |
| | | 118304770 | | |
| CR002250 | − | Chr11:118304752- | UUUUCUGAAGCAGGCACCUG | 10697 |
| | | 118304774 | | |
| CR002251 | + | Chr11:118304889- | UCCAGAAGUAGUAAGUCUGC | 10698 |
| | | 118304911 | | |
| CR002252 | + | Chr11:118304940- | CCAUGAAACAAAGAUGCAGU | 10699 |
| | | 118304962 | | |
| CR002253 | + | Chr11:118304941- | CAUGAAACAAAGAUGCAGUC | 10700 |
| | | 118304963 | | |
| CR002254 | + | Chr11:118304951- | AGAUGCAGUCGGGCACUCAC | 10701 |
| | | 118304973 | | |
| CR002255 | + | Chr11:118304961- | GGGCACUCACUGGAGAGUUC | 10702 |
| | | 118304983 | | |
| CR002256 | + | Chr11:118304962- | GGCACUCACUGGAGAGUUCU | 10703 |
| | | 118304984 | | |
| CR002257 | − | Chr11:118304912- | UUACUUUACUAAGAUGGCGG | 10704 |
| | | 118304934 | | |
| CR002258 | − | Chr11:118304915- | CUGUUACUUUACUAAGAUGG | 10705 |
| | | 118304937 | | |
| CR002259 | − | Chr11:118304918- | GGACUGUUACUUUACUAAGA | 10706 |
| | | 118304940 | | |
| CR002260 | − | Chr11:118304939- | CGACUGCAUCUUUGUUUCAU | 10707 |
| | | 118304961 | | |
| CR002261 | − | Chr11:118304940- | CCGACUGCAUCUUUGUUUCA | 10708 |
| | | 118304962 | | |
| CR002262 | − | Chr11:118304985- | ACUCACCUGAUAAGAGGCAG | 10709 |
| | | 118305007 | | |
| CR002263 | − | Chr11:118304991- | CAUCCUACUCACCUGAUAAG | 10710 |
| | | 118305013 | | |
| CR002264 | + | Chr11:118307269- | UUUCUUAUUUAUUUUCUAGU | 10711 |
| | | 118307291 | | |
| CR002265 | + | Chr11:118307276- | UUUAUUUUCUAGUUGGCGUU | 10712 |
| | | 118307298 | | |
| CR002266 | + | Chr11:118307277- | UUAUUUUCUAGUUGGCGUUU | 10713 |
| | | 118307299 | | |
| CR002267 | + | Chr11:118307278- | UAUUUUCUAGUUGGCGUUUG | 10714 |
| | | 118307300 | | |
| CR002268 | + | Chr11:118307279- | AUUUUCUAGUUGGCGUUUGG | 10715 |
| | | 118307301 | | |
| CR002269 | + | Chr11:118308419- | CUUUUCAGGUAAUGAAGAAA | 10716 |
| | | 118308441 | | |
| CR002270 | + | Chr11:118312617- | GCAUAUAAAGUCUCCAUCUC | 10717 |
| | | 118312639 | | |
| CR002271 | + | Chr11:118312653- | UUGACAUGCCCUCAGUAUCC | 10718 |
| | | 118312675 | | |
| CR002272 | + | Chr11:118312669- | AUCCUGGAUCUGAAAUACUA | 10719 |
| | | 118312691 | | |
| CR002273 | + | Chr11:118312695- | CACAAUGAUAAAAACAUAGG | 10720 |
| | | 118312717 | | |
| CR002274 | + | Chr11:118312703- | UAAAAACAUAGGCGGUGAUG | 10721 |
| | | 118312725 | | |
| CR002275 | + | Chr11:118312719- | GAUGAGGAUGAUAAAAACAU | 10722 |
| | | 118312741 | | |
| CR002276 | + | Chr11:118312730- | UAAAAACAUAGGCAGUGAUG | 10723 |
| | | 118312752 | | |
| CR002277 | + | Chr11:118312748- | UGAGGAUCACCUGUCACUGA | 10724 |
| | | 118312770 | | |
| CR002278 | + | Chr11:118312763- | ACUGAAGGAAUUUUCAGAAU | 10725 |
| | | 118312785 | | |
| CR002279 | + | Chr11:118312773- | UUUUCAGAAUUGGAGCAAAG | 10726 |
| | | 118312795 | | |
| CR002280 | + | Chr11:118312838- | GAACUUUUAUCUCUACCUGA | 10727 |
| | | 118312860 | | |
| CR002281 | − | Chr11:118312630- | UAUUACUGUGGUUCCAGAGA | 10728 |
| | | 118312652 | | |
| CR002282 | − | Chr11:118312642- | AGGGCAUGUCAAUAUUACUG | 10729 |
| | | 118312664 | | |
| CR002283 | − | Chr11:118312661- | UUUCAGAUCCAGGAUACUGA | 10730 |
| | | 118312683 | | |
| CR002284 | − | Chr11:118312662- | AUUUCAGAUCCAGGAUACUG | 10731 |
| | | 118312684 | | |
| CR002285 | − | Chr11:118312671- | UGCCAUAGUAUUUCAGAUCC | 10732 |
| | | 118312693 | | |
| CR002286 | − | Chr11:118312757- | CUGAAAAUUCCUUCAGUGAC | 10733 |
| | | 118312779 | | |
| CR002287 | | Chr11:118312811- | CUUCUGGUUUGCUUCCUCUG | 10734 |
| | | 118312833 | | |
| CR002288 | − | Chr11:118312812- | UCUUCUGGUUUGCUUCCUCU | 10735 |
| | | 118312834 | | |
| CR002289 | − | Chr11:118312813- | AUCUUCUGGUUUGCUUCCUC | 10736 |
| | | 118312835 | | |
| CR002290 | − | Chr11:118312827- | AGAUAAAAGUUCGCAUCUUC | 10737 |
| | | 118312849 | | |
| CR002291 | − | Chr11:118312853- | CUGGAUUACCUCUUGCCCUC | 10738 |
| | | 118312875 | | |
| CR002292 | + | Chr11:118313720- | CAUGGAGAUGGAUGUGAUGU | 10739 |
| | | 118313742 | | |
| CR002293 | + | Chr11:118313758- | UAGUGGACAUCUGCAUCACU | 10740 |
| | | 118313780 | | |
| CR002294 | + | Chr11:118313760- | GUGGACAUCUGCAUCACUGG | 10741 |
| | | 118313782 | | |
| CR002295 | + | Chr11:118313774- | CACUGGGGGCUUGCUGCUGC | 10742 |
| | | 118313796 | | |
| CR002296 | + | Chr11:118313801- | CUACUGGAGCAAGAAUAGAA | 10743 |
| | | 118313823 | | |
| CR002297 | + | Chr11:118313807- | GAGCAAGAAUAGAAAGGCCA | 10744 |
| | | 118313829 | | |
| CR002298 | + | Chr11:118313826- | AAGGCCAAGCCUGUGACACG | 10745 |
| | | 118313848 | | |
| CR002299 | + | Chr11:118313831- | CAAGCCUGUGACACGAGGAG | 10746 |
| | | 118313853 | | |
| CR002300 | − | Chr11:118313746- | GAUGUCCACUAUGACAAUUG | 10747 |
| | | 118313768 | | |
| CR002301 | − | Chr11:118313824- | UCGUGUCACAGGCUUGGCCU | 10748 |
| | | 118313846 | | |
| CR002302 | − | Chr11:118313830- | CGCUCCUCGUGUCACAGGCU | 10749 |
| | | 118313852 | | |
| CR002303 | − | Chr11:118313835- | GCACCCGCUCCUCGUGUCAC | 10750 |
| | | 118313857 | | |
| CR002304 | + | Chr11:118314442- | CCGCAGGACAAAACAAGGAG | 10751 |
| | | 118314464 | | |
| CR002305 | − | Chr11:118314465- | UCUGGGUUGGGAACAGGUGG | 10752 |
| | | 118314487 | | |
| CR002306 | − | Chr11:118314468- | UAGUCUGGGUUGGGAACAGG | 10753 |
| | | 118314490 | | |
| CR002307 | − | Chr11:118314471- | UCAUAGUCUGGGUUGGGAAC | 10754 |
| | | 118314493 | | |
| CR002308 | − | Chr11:118314477- | GUUACCUCAUAGUCUGGGUU | 10755 |
| | | 118314499 | | |
| CR002309 | − | Chr11:118314478- | CGUUACCUCAUAGUCUGGGU | 10756 |
| | | 118314500 | | |
| CR002310 | − | Chr11:118314482- | CCCACGUUACCUCAUAGUCU | 10757 |
| | | 118314504 | | |
| CR002311 | − | Chr11:118314483- | UCCCACGUUACCUCAUAGUC | 10758 |
| | | 118314505 | | |
| CR002312 | + | Chr11:118315472- | UAUUUCACCCCCAGCCCAUC | 10759 |
| | | 118315494 | | |
| CR002313 | + | Chr11:118315477- | CACCCCCAGCCCAUCCGGAA | 10760 |
| | | 118315499 | | |
| CR002314 | + | Chr11:118315484- | AGCCCAUCCGGAAAGGCCAG | 10761 |
| | | 118315506 | | |
| CR002315 | + | Chr11:118315485- | GCCCAUCCGGAAAGGCCAGC | 10762 |
| | | 118315507 | | |
| CR002316 | + | Chr11:118315498- | GGCCAGCGGGACCUGUAUUC | 10763 |
| | | 118315520 | | |
| CR002317 | + | Chr11:118315528- | CAGAGACGCAUCUGACCCUC | 10764 |
| | | 118315550 | | |

TABLE 6f
Exemplary preferred targeting domains for gRNA molecules
targeting CD3G

| Targeting | | | Target Sequence | | SEQ |
|---|---|---|---|---|---|
| Domain Id | Exon | Strand | Location (hg38) | Targeting Domain Sequence | ID NO: |
| CR005349 | 3 | − | chr11:118349904- | UUACACUGAUACAUCCCUCG | 10765 |
| | | | 118349926 | | |
| CR005350 | 4 | − | chr11:118350673- | GCAUUCUUUUACCUCUCGAC | 10766 |
| | | | 118350695 | | |
| CR005351 | 3 | − | chr11:118349903- | UACACUGAUACAUCCCUCGA | 10767 |
| | | | 118349925 | | |
| CR005352 | 3 | − | chr11:118349896- | AUACAUCCCUCGAGGGUCCU | 10768 |
| | | | 118349918 | | |
| CR005353 | 5 | − | chr11:118351652- | UACCUGGUAGAGCUGGUCAU | 10769 |
| | | | 118351674 | | |
| CR005354 | 3 | + | chr11:118349907- | CGAGGGAUGUAUCAGUGUAA | 10770 |
| | | | 118349929 | | |
| CR005355 | 4 | + | chr11:118350640- | GGUCUACUUCAUUGCUGGAC | 10771 |
| | | | 118350662 | | |
| CR005356 | 3 | + | chr11:118349890- | GUAAUGCCAAGGACCCUCGA | 10772 |
| | | | 118349912 | | |
| CR005357 | 5 | − | chr11:118351651- | ACCUGGUAGAGCUGGUCAUU | 10773 |
| | | | 118351673 | | |
| CR005358 | 4 | + | chr11:118350618- | GCAUUUUCGUCCUUGCUGUU | 10774 |
| | | | 118350640 | | |
| CR005359 | 4 | + | chr11:118350635- | GUUGGGGUCUACUUCAUUGC | 10775 |
| | | | 118350657 | | |
| CR005360 | 6 | − | chr11:118352405- | GUCAUCUUCUCGAUCCUUGA | 10776 |
| | | | 118352427 | | |
| CR005361 | 6 | − | chr11:118352404- | UCAUCUUCUCGAUCCUUGAG | 10777 |
| | | | 118352426 | | |
| CR005362 | 3 | + | chr11:118349760- | GUGUAUGACUAUCAAGAAGA | 10778 |
| | | | 118349782 | | |
| CR005363 | 3 | + | chr11:118349738- | UUCAGGAAACCACUUGGUUA | 10779 |
| | | | 118349760 | | |

TABLE 6g
Exemplary preferred targeting domains for gRNA molecules
targeting CD3D

| | | | | | SEQ |
|---|---|---|---|---|---|
| Targeting | | | Target Sequence | | ID |
| Domain ID | Exon | Strand | Location (hg38) | Targeting Domain Sequence | NO: |
| CR005334 | 2 | + | chr11:118340373- | ACUUCGAUAAUGAACUUGCA | 10780 |
| | | | 118340395 | | |
| CR005335 | 5 | + | chr11:118339204- | AGCAUCAUCUCGAUCUCGGA | 10781 |
| | | | 118339226 | | |
| CR005336 | 5 | + | chr11:118339203- | GAGCAUCAUCUCGAUCUCGG | 10782 |
| | | | 118339225 | | |
| CR005337 | 2 | | chr11:118340453- | GGACCUGGGAAAACGCAUCC | 10783 |
| | | | 118340475 | | |
| CR005338 | 2 | - | chr11:118340467- | GACAUUACAAGACUGGACCU | 10784 |
| | | | 118340489 | | |
| CR005339 | 2 | - | chr11:118340443- | AAACGCAUCCUGGACCCACG | 10785 |
| | | | 118340465 | | |
| CR005340 | 5 | + | chr11:118339004- | GGCGAGAUCCCAAGCAAGUC | 10786 |
| | | | 118339026 | | |
| CR005341 | 5 | + | chr11:118339200- | ACUGAGCAUCAUCUCGAUCU | 10787 |
| | | | 118339222 | | |
| CR005342 | 5 | + | chr11:118339205- | GCAUCAUCUCGAUCUCGGAG | 10788 |
| | | | 118339227 | | |
| CR005343 | 4 | - | chr11:118339469- | CCGACACACAAGCUCUGUUG | 10789 |
| | | | 118339491 | | |
| CR005344 | 2 | + | chr11:118340429- | UACACCUAUAUAUUCCUCGU | 10790 |
| | | | 118340451 | | |
| CR005345 | 2 | - | chr11:118340558- | GAUACCUAUAGAGGAACUUG | 10791 |
| | | | 118340580 | | |
| CR005346 | 5 | + | chr11:118339027- | ACAACUCCCACGCCUUGCCC | 10792 |
| | | | 118339049 | | |
| CR005347 | 2 | + | chr11:118340428- | UUACACCUAUAUAUUCCUCG | 10793 |
| | | | 118340450 | | |
| CR005348 | 5 | - | chr11:118339150- | GGAACAAGUGAACCUGAGAC | 10794 |
| | | | 118339172 | | |

[0701] In aspects of the invention, a gRNA to TRAC which includes the targeting domain of CR00961 (SEQ ID NO: 5569, underlined below, or modified version thereof (also as underlined below)), e.g., one of the gRNA molecules described below, is used in the CRISPR systems, methods, cells and other aspects and embodiments of the invention (and combinations thereof), including in aspects involving more than one gRNA molecule, e.g., described herein:

sgRNA CR00961 #1:
(SEQ ID NO: 7833)
AGAGUCUCUCAGCUGGUACAGUUUUAGAGCUAGAAAUAGCAAGUUAAAAU
AAGGCUAGUCCGUUAUCAACUUGAAAAAGUGGCACCGAGUCGGUGCUUUU
sgRNA CR00961 #2:
(SEQ ID NO: 7834)
mA*mG*mA*GUCUCUCAGCUGGUACAGUUUUAGAGCUAGAAAUAGCAAGU
UAAAAUAAGGCUAGUCCGUUAUCAACUUGAAAAAGUGGCACCGAGUCGGU
GCU*mU*mU*mU
sgRNA CR00961 #3:
(SEQ ID NO: 7835)
mA*mG*mA*GUCUCUCAGCUGGUACAGUUUUAGAGCUAGAAAUAGCAAGU
UAAAAUAAGGCUAGUCCGUUAUCAACUUGAAAAAGUGGCACCGAGUCGGU
GCmU*mU*mU*U
dgRNA CR00961 #1:
crRNA:
(SEQ ID NO: 7836)
AGAGUCUCUCAGCUGGUACAGUUUUAGAGCUAUGCUGUUUUG
tracr:
(SEQ ID NO: 6660)
AACAGCAUAGCAAGUUAAAAUAAGGCUAGUCCGUUAUCAACUUGAAAAAG
UGGCACCGAGUCGGUGCUUUUUUU
dgRNA CR00961 #2:
crRNA:
(SEQ ID NO: 7837)
mA*mG*mA*GUCUCUCAGCUGGUACAGUUUUAGAGCUAUGCUGUU*mU*
mU*mG
tracr:
(SEQ ID NO: 10798)
mA*mA*mC*AGCAUAGCAAGUUAAAAUAAGGCUAGUCCGUUAUCAACUUG
AAAAAGUGGCACCGAGUCGGUGCUUUU*mU*mU*mU
dgRNA CR00961 #3:
crRNA:
(SEQ ID NO: 7837)
mA*mG*mA*GUCUCUCAGCUGGUACAGUUUUAGAGCUAUGCUGUU*mU*
mU*mG
tracr:
(SEQ ID NO: 6660)
AACAGCAUAGCAAGUUAAAAUAAGGCUAGUCCGUUAUCAACUUGAAAAAG
UGGCACCGAGUCGGUGCUUUUUUU.

[0702] In aspects of the invention, a gRNA to TRAC which includes the targeting domain of CR00984 (SEQ ID NO: 5592, underlined below, or modified version thereof (also as underlined below)), e.g., one of the gRNA molecules described below, is used in the CRISPR systems, methods, cells and other aspects and embodiments of the invention (and combinations thereof), including in aspects involving more than one gRNA molecule, e.g., described herein:

sgRNA CR00984 #1:
(SEQ ID NO: 7838)
UUCGGAACCCAAUCACUGACGUUUUAGAGCUAGAAAUAGCAAGUUAAAAU
AAGGCUAGUCCGUUAUCAACUUGAAAAAGUGGCACCGAGUCGGUGCUUUU
sgRNA CR00984 #2:
(SEQ ID NO: 7839)
mU*mU*mC*GGAACCCAAUCACUGACGUUUUAGAGCUAGAAAUAGCAAGU
UAAAAUAAGGCUAGUCCGUUAUCAACUUGAAAAAGUGGCACCGAGUCGGU
GCU*mU*mU*mU
sgRNA CR00984 #3:
(SEQ ID NO: 7840)
mU*mU*mC*GGAACCCAAUCACUGACGUUUUAGAGCUAGAAAUAGCAAGU
UAAAAUAAGGCUAGUCCGUUAUCAACUUGAAAAAGUGGCACCGAGUCGGU
GCmU*mU*mU*U
dgRNA CR00984 #1:
crRNA:
(SEQ ID NO: 7841)
UUCGGAACCCAAUCACUGACGUUUUAGAGCUAUGCUGUUUUG
tracr:
(SEQ ID NO: 6660)
AACAGCAUAGCAAGUUAAAAUAAGGCUAGUCCGUUAUCAACUUGAAAAAG
UGGCACCGAGUCGGUGCUUUUUUU
dgRNA CR00984 #2:
crRNA:
(SEQ ID NO: 7842)
mU*mU*mC*GGAACCCAAUCACUGACGUUUUAGAGCUAUGCUGUU*mU*
mU*mG
tracr:
(SEQ ID NO: 10798)
mA*mA*mC*AGCAUAGCAAGUUAAAAUAAGGCUAGUCCGUUAUCAACUUG
AAAAAGUGGCACCGAGUCGGUGCUUUU*mU*mU*mU
dgRNA CR00984 #3:
crRNA:
(SEQ ID NO: 7842)
mU*mU*mC*GGAACCCAAUCACUGACGUUUUAGAGCUAUGCUGUU*mU*
mU*mG
tracr:
(SEQ ID NO: 6660)
AACAGCAUAGCAAGUUAAAAUAAGGCUAGUCCGUUAUCAACUUGAAAAAG
UGGCACCGAGUCGGUGCUUUUUUU.

[0703] In aspects of the invention, a gRNA to TRBC which includes the targeting domain of CR00798 (SEQ ID NO: 5694, underlined below, or modified version thereof (also as underlined below)), e.g., one of the gRNA molecules described below, is used in the CRISPR systems, methods, cells and other aspects and embodiments of the invention (and combinations thereof), including in aspects involving more than one

sgRNA CR00798 #1:
(SEQ ID NO: 7843)
UGGCUCAAACACAGCGACCUGUUUUAGAGCUAGAAAUAGCAAGUUAAAAU
AAGGCUAGUCCGUUAUCAACUUGAAAAAGUGGCACCGAGUCGGUGCUUUU
sgRNA CR00798 #2:
(SEQ ID NO: 7844)
mU*mG*mG*CUCAAACACAGCGACCUGUUUUAGAGCUAGAAAUAGCAAGU
UAAAAUAAGGCUAGUCCGUUAUCAACUUGAAAAAGUGGCACCGAGUCGGU
GCU*mU*mU*mU
sgRNA CR00798 #3:
(SEQ ID NO: 7845)
mU*mG*mG*CUCAAACACAGCGACCUGUUUUAGAGCUAGAAAUAGCAAGU
UAAAAUAAGGCUAGUCCGUUAUCAACUUGAAAAAGUGGCACCGAGUCGGU
GCmU*mU*mU*U
dgRNA CR00798 #1:
crRNA:
(SEQ ID NO: 7846)
UGGCUCAAACACAGCGACCUGUUUUAGAGCUAUGCUGUUUUG
tracr:
(SEQ ID NO: 6660)
AACAGCAUAGCAAGUUAAAAUAAGGCUAGUCCGUUAUCAACUUGAAAAAG
UGGCACCGAGUCGGUGCUUUUUUU
dgRNA CR00798 #2:
crRNA:
(SEQ ID NO: 7847)
mU*mG*mG*CUCAAACACAGCGACCUGUUUUAGAGCUAUGCUGUU*mU*
mU*mG
tracr:
(SEQ ID NO: 10798)
mA*mA*mC*AGCAUAGCAAGUUAAAAUAAGGCUAGUCCGUUAUCAACUUG
AAAAAGUGGCACCGAGUCGGUGCUUUU*mU*mU*mU
dgRNA CR00798 #3:
crRNA:
(SEQ ID NO: 7847)
mU*mG*mG*CUCAAACACAGCGACCUGUUUUAGAGCUAUGCUGUU*mU*
mU*mG
tracr:
(SEQ ID NO: 6660)
AACAGCAUAGCAAGUUAAAAUAAGGCUAGUCCGUUAUCAACUUGAAAAAG
UGGCACCGAGUCGGUGCUUUUUUU.

[0704] In aspects of the invention, a gRNA to TRBC which includes the targeting domain of CR00823 (SEQ ID NO: 5719, underlined below, or modified version thereof (also as underlined below)), e.g., one of the gRNA molecules described below, is used in the CRISPR systems, methods, cells and other aspects and embodiments of the invention (and combinations thereof), including in aspects involving more than one

sgRNA CR00823 #1:
(SEQ ID NO: 7848)
UCCCUAGCAAGAUCUCAUAGGUUUUAGAGCUAGAAAUAGCAAGUUAAAAU
AAGGCUAGUCCGUUAUCAACUUGAAAAAGUGGCACCGAGUCGGUGCUUUU
sgRNA CR00823 #2:
(SEQ ID NO: 7849)
mU*mC*mC*CUAGCAAGAUCUCAUAGGUUUUAGAGCUAGAAAUAGCAAGU
UAAAAUAAGGCUAGUCCGUUAUCAACUUGAAAAAGUGGCACCGAGUCGGU
GCU*mU*mU*mU
sgRNA CR00823 #3:
(SEQ ID NO: 7850)
mU*mC*mC*CUAGCAAGAUCUCAUAGGUUUUAGAGCUAGAAAUAGCAAG
UUAAAAUAAGGCUAGUCCGUUAUCAACUUGAAAAAGUGGCACCGAGUCG
GUGCmU*mU*mU*U
dgRNA CR00823 #1:
crRNA:
(SEQ ID NO: 7851)
UCCCUAGCAAGAUCUCAUAGGUUUUAGAGCUAUGCUGUUUUG
tracr:
(SEQ ID NO: 6660)
AACAGCAUAGCAAGUUAAAAUAAGGCUAGUCCGUUAUCAACUUGAAAAAG
UGGCACCGAGUCGGUGCUUUUUUU
dgRNA CR00823 #2:
crRNA:
(SEQ ID NO: 7852)
mU*mC*mC*CUAGCAAGAUCUCAUAGGUUUUAGAGCUAUGCUGUU*mU*
mU*mG
tracr:
(SEQ ID NO: 10798)
mA*mA*mC*AGCAUAGCAAGUUAAAAUAAGGCUAGUCCGUUAUCAACUUG
AAAAAGUGGCACCGAGUCGGUGCUUUU*mU*mU*mU
dgRNA CR00823 #3:
crRNA:
(SEQ ID NO: 7852)
mU*mC*mC*CUAGCAAGAUCUCAUAGGUUUUAGAGCUAUGCUGUU*mU*
mU*mG
tracr:
(SEQ ID NO: 6660)
AACAGCAUAGCAAGUUAAAAUAAGGCUAGUCCGUUAUCAACUUGAAAAAG
UGGCACCGAGUCGGUGCUUUUUUU.

[0705] In aspects of the invention, a gRNA to B2M which includes the targeting domain of CR00442 (SEQ ID NO: 5496, underlined below, or modified version thereof (also as underlined below)), e.g., one of the gRNA molecules described below, is used in the CRISPR systems, methods, cells and other aspects and embodiments of the invention (and combinations thereof), including in aspects involving more than one gRNA molecule, e.g., described herein:

sgRNA CR00442 #1:
(SEQ ID NO: 7853)
GGCCACGGAGCGAGACAUCUGUUUUAGAGCUAGAAAUAGCAAGUUAAAAU
AAGGCUAGUCCGUUAUCAACUUGAAAAAGUGGCACCGAGUCGGUGCUUUU
sgRNA CR00442 #2:
(SEQ ID NO: 7854)
mG*mG*mC*CACGGAGCGAGACAUCUGUUUUAGAGCUAGAAAUAGCAAGU
UAAAAUAAGGCUAGUCCGUUAUCAACUUGAAAAAGUGGCACCGAGUCGGU
GCU*mU*mU*mU
sgRNA CR00442 #3:
(SEQ ID NO: 7855)
mG*mG*mC*CACGGAGCGAGACAUCUGUUUUAGAGCUAGAAAUAGCAAGU
UAAAAUAAGGCUAGUCCGUUAUCAACUUGAAAAAGUGGCACCGAGUCGGU
GCmU*mU*mU*U
dgRNA CR00442 #1:
crRNA:
(SEQ ID NO: 7856)
GGCCACGGAGCGAGACAUCUGUUUUAGAGCUAUGCUGUUUUG
tracr:
(SEQ ID NO: 6660)
AACAGCAUAGCAAGUUAAAAUAAGGCUAGUCCGUUAUCAACUUGAAAAAG
UGGCACCGAGUCGGUGCUUUUUUU
dgRNA CR00442 #2:
crRNA:
(SEQ ID NO: 7857)
mG*mG*mC*CACGGAGCGAGACAUCUGUUUUAGAGCUAUGCUGUU*mU*
mU*mG
tracr:
(SEQ ID NO: 10798)
mA*mA*mC*AGCAUAGCAAGUUAAAAUAAGGCUAGUCCGUUAUCAACUUG
AAAAAGUGGCACCGAGUCGGUGCUUUU*mU*mU*mU
dgRNA CR00442 #3:
crRNA:
(SEQ ID NO: 7857)
mG*mG*mC*CACGGAGCGAGACAUCUGUUUUAGAGCUAUGCUGUU*mU*
mU*mG
tracr:
(SEQ ID NO: 6660)
AACAGCAUAGCAAGUUAAAAUAAGGCUAGUCCGUUAUCAACUUGAAAAAG
UGGCACCGAGUCGGUGCUUUUUUU.

[0706] In aspects of the invention, a gRNA to B2M which includes the targeting domain of CR00444 (SEQ ID NO: 5498, underlined below, or modified version thereof (also as underlined below)), e.g., one of the gRNA molecules described below, is used in the CRISPR systems, methods, cells and other aspects and embodiments of the invention (and combinations thereof), including in aspects involving more than one

sgRNA CR00444 #1:
(SEQ ID NO: 7858)
GAGUAGCGCGAGCACAGCUAGUUUUAGAGCUAGAAAUAGCAAGUUAAAAU
AAGGCUAGUCCGUUAUCAACUUGAAAAAGUGGCACCGAGUCGGUGCUUUU
sgRNA CR00444 #2:
(SEQ ID NO: 7859)
mG*mA*mU*AGCGCGAGCACAGCUAGUUUUAGAGCUAGAAAUAGCAAGUU
AAAAUAAGGCUAGUCCGUUAUCAACUUGAAAAAGUGGCACCGAGUCGGUG
CU*mU*mU*mU
sgRNA CR00444 #3:
(SEQ ID NO: 7860)
mG*mA*mU*AGCGCGAGCACAGCUAGUUUUAGAGCUAGAAAUAGCAAGUU
AAAAUAAGGCUAGUCCGUUAUCAACUUGAAAAAGUGGCACCGAGUCGGUG
CmU*mU*mU*U
dgRNA CR00444 #1:
crRNA:
(SEQ ID NO: 7861)
GAGUAGCGCGAGCACAGCUAGUUUUAGAGCUAUGCUGUUUUG
tracr:
(SEQ ID NO: 6660)
AACAGCAUAGCAAGUUAAAAUAAGGCUAGUCCGUUAUCAACUUGAAAAAG
UGGCACCGAGUCGGUGCUUUUUUU
dgRNA CR00444 #2:
crRNA:
(SEQ ID NO: 7862)
mG*mA*mU*AGCGCGAGCACAGCUAGUUUUAGAGCUAUGCUGUU*mU*
mU*mG
tracr:
(SEQ ID NO: 10798)
mA*mA*mC*AGCAUAGCAAGUUAAAAUAAGGCUAGUCCGUUAUCAACUUG
AAAAAGUGGCACCGAGUCGGUGCUUUU*mU*mU*mU
dgRNA CR00444 #3:
crRNA:
(SEQ ID NO: 7862)
mG*mA*mU*AGCGCGAGCACAGCUAGUUUUAGAGCUAUGCUGUU*mU*
mU*mG
tracr:
(SEQ ID NO: 6660)
AACAGCAUAGCAAGUUAAAAUAAGGCUAGUCCGUUAUCAACUUGAAAAAG
UGGCACCGAGUCGGUGCUUUUUUU.

[0707] In aspects of the invention, a gRNA to FKBP1A which includes the targeting domain of CR002097 (SEQ ID NO: 6705, underlined below, or modified version thereof (also as underlined below)), e.g., one of the gRNA molecules described below, is used in the CRISPR systems, methods, cells and other aspects and embodiments of the invention (and combinations thereof), including in aspects involving more than one gRNA molecule, e.g., described herein:

sgRNA CR002097 #1:
(SEQ ID NO: 7863)
CAAGCGCGGCCAGACCUGCGGUUUUAGAGCUAGAAAUAGCAAGUUAAAAU
AAGGCUAGUCCGUUAUCAACUUGAAAAAGUGGCACCGAGUCGGUGCUUUU
sgRNA CR002097 #2:
(SEQ ID NO: 7864)
mC*mA*mA*GCGCGGCCAGACCUGCGGUUUUAGAGCUAGAAAUAGCAAGU
UAAAAUAAGGCUAGUCCGUUAUCAACUUGAAAAAGUGGCACCGAGUCGGU
GCU*mU*mU*mU
sgRNA CR002097 #3:
(SEQ ID NO: 7865)
mC*mA*mA*GCGCGGCCAGACCUGCGGUUUUAGAGCUAGAAAUAGCAAGU
UAAAAUAAGGCUAGUCCGUUAUCAACUUGAAAAAGUGGCACCGAGUCGGU
GCmU*mU*mU*U
dgRNA CR002097 #1:
crRNA:
(SEQ ID NO: 7866)
CAAGCGCGGCCAGACCUGCGGUUUUAGAGCUAUGCUGUUUUG
tracr:
(SEQ ID NO: 6660)
AACAGCAUAGCAAGUUAAAAUAAGGCUAGUCCGUUAUCAACUUGAAAAAG
UGGCACCGAGUCGGUGCUUUUUUU
dgRNA CR002097 #2:
crRNA:
(SEQ ID NO: 7867)
mC*mA*mA*GCGCGGCCAGACCUGCGGUUUUAGAGCUAUGCUG
UU*mU*mU*mG
tracr:
(SEQ ID NO: 10798)
mA*mA*mC*AGCAUAGCAAGUUAAAAUAAGGCUAGUCCGUUAUCAACUUG
AAAAAGUGGCACCGAGUCGGUGCUUUU*mU*mU*mU
dgRNA CR002097 #3:
crRNA:
(SEQ ID NO: 7867)
mC*mA*mA*GCGCGGCCAGACCUGCGGUUUUAGAGCUAUGCUGUU*mU*
mU*mG
tracr:
(SEQ ID NO: 6660)
AACAGCAUAGCAAGUUAAAAUAAGGCUAGUCCGUUAUCAACUUGAAAAAG
UGGCACCGAGUCGGUGCUUUUUUU

[0708] In aspects of the invention, a gRNA to FKBP1A which includes the targeting domain of CR002100 (SEQ ID NO: 6708, underlined below, or modified version thereof (also as underlined below)), e.g., one of the gRNA molecules described below, is used in the CRISPR systems, methods, cells and other aspects and embodiments of the invention (and combinations thereof), including in aspects involving more than one

sgRNA CR002100 #1:
(SEQ ID NO: 7868)
CCGCUGGGCCCCCGACUCACGUUUUAGAGCUAGAAAUAGCAAGUUAAAAU
AAGGCUAGUCCGUUAUCAACUUGAAAAAGUGGCACCGAGUCGGUGCUUUU
sgRNA CR002100 #2:
(SEQ ID NO: 7869)
mC*mC*mG*CUGGGCCCCCGACUCACGUUUUAGAGCUAGAAAUAGCAAGU
UAAAAUAAGGCUAGUCCGUUAUCAACUUGAAAAAGUGGCACCGAGUCGGU
GCU*mU*mU*mU
sgRNA CR002100 #3:
(SEQ ID NO: 7870)
mC*mC*mG*CUGGGCCCCCGACUCACGUUUUAGAGCUAGAAAUAGCAAGU
UAAAAUAAGGCUAGUCCGUUAUCAACUUGAAAAAGUGGCACCGAGUCGGU
GCmU*mU*mU*U
dgRNA CR002100 #1:
crRNA:
(SEQ ID NO: 7871)
CCGCUGGGCCCCCGACUCACGUUUUAGAGCUAUGCUGUUUUG
tracr:
(SEQ ID NO: 6660)
AACAGCAUAGCAAGUUAAAAUAAGGCUAGUCCGUUAUCAACUUGAAAAAG
UGGCACCGAGUCGGUGCUUUUUUU
dgRNA CR002100 #2:
crRNA:
(SEQ ID NO: 7872)
mC*mC*mG*CUGGGCCCCCGACUCACGUUUUAGAGCUAUGCUGUU*mU*
mU*mG
tracr:
(SEQ ID NO: 10798)
mA*mA*mC*AGCAUAGCAAGUUAAAAUAAGGCUAGUCCGUUAUCAACUU
GAAAAAGUGGCACCGAGUCGGUGCUUUU*mU*mU*mU
dgRNA CR002100 #3:
crRNA:
(SEQ ID NO: 7872)
mC*mC*mG*CUGGGCCCCCGACUCACGUUUUAGAGCUAUGCUGUU*mU*
mU*mG
tracr:
(SEQ ID NO: 6660)
AACAGCAUAGCAAGUUAAAAUAAGGCUAGUCCGUUAUCAACUUGAAAAAG
UGGCACCGAGUCGGUGCUUUUUUU.

[0709] In each of the gRNA molecules described above, a “*” denotes a phosphorothioate bond between the adjacent nucleotides, and “mN” (where N=A, G, C or U) denotes a 2′-OMe modified nucleotide. In embodiments, any of the gRNA molecules described herein, e.g., described above, is complexed with a Cas9 molecule, e.g., as described herein, to form a ribonuclear protein complex (RNP). Such RNPs are particularly useful in the methods, cells, and other aspects and embodiments of the invention, e.g., described herein.

### III. Methods for Designing gRNAs

[0710] Methods for designing gRNAs are described herein, including methods for selecting, designing and validating target sequences. Exemplary targeting domains are also provided herein. Targeting Domains discussed herein can be incorporated into the gRNAs described herein.

[0711] Methods for selection and validation of target sequences as well as off-target analyses are described, e.g., in. Mali el al., 2013 SCIENCE 339(6121): 823-826; Hsu et al, 2013 NAT BIOTECHNOL, 31 (9): 827-32; Fu et al, 2014 NAT BIOTECHNOL, doi: 10.1038/nbt.2808. PubMed PM ID: 24463574; Heigwer et al, 2014 NAT METHODS 11(2): 122-3. doi: 10.1038/nmeth.2812. PubMed PMID: 24481216; Bae el al, 2014 BIOINFORMATICS PubMed PMID: 24463181; Xiao A el al, 2014 BIOINFORMATICS PubMed PMID: 24389662.

[0712] For example, a software tool can be used to optimize the choice of gRNA within a user's target sequence, e.g., to minimize total off-target activity across the genome. Off target activity may be other than cleavage. For each possible gRNA choice e.g., using S. pyogenes Cas9, the tool can identify all off-target sequences (e.g., preceding either NAG or NGG PAMs) across the genome that contain up to certain number (e.g., 1, 2, 3, 4, 5, 6, 7, 8, 9, or 10) of mismatched base-pairs. The cleavage efficiency at each off-target sequence can be predicted, e.g., using an experimentally-derived weighting scheme. Each possible gRNA is then ranked according to its total predicted off-target cleavage; the top-ranked gRNAs represent those that are likely to have the greatest on-target and the least off-target cleavage. Other functions, e.g., automated reagent design for CRISPR construction, primer design for the on-target Surveyor assay, and primer design for high-throughput detection and quantification of off-target cleavage via next-gen sequencing, can also be included in the tool. Candidate gRNA molecules can be evaluated by art-known methods or as described herein.

[0713] Although software algorithms may be used to generate an initial list of potential gRNA molecules, cutting efficiency and specificity will not necessarily reflect the predicted values, and gRNA molecules typically require screening in specific cell lines, e.g., primary human cell lines, e.g., primary human immune effector cells, e.g., primary human T cells, to determine, for example, cutting efficiency, indel formation, cutting specificity and change in desired phenotype. These properties may be assayed by the methods described herein.

### IV. Cas Molecules

### Cas9 Molecules

[0714] In preferred embodiments, the Cas molecule is a Cas9 molecule. Cas9 molecules of a variety of species can be used in the methods and compositions described herein. While the S. pyogenes Cas9 molecule are the subject of much of the disclosure herein, Cas9 molecules of, derived from, or based on the Cas9 proteins of other species listed herein can be used as well. In other words, other Cas9 molecules, e.g., S. thermophilus, Staphylococcus aureus and/or Neisseria meningitidis Cas9 molecules, may be used in the systems, methods and compositions described herein. Additional Cas9 species include: Acidovorax avenae, Actinobacillus pleuropneumoniae, Actinobacillus succinogenes, Actinobacillus suis, Actinomyces sp., cycliphilus denitrificans, Aminomonas paucivorans, Bacillus cereus, Bacillus smithii, Bacillus thuringiensis, Bacteroides sp., Blastopirellula marina, Bradyrhiz obium sp., Brevibacillus latemsporus, Campylobacter coli, Campylobacter jejuni, Campylobacter lad, Candidatus Puniceispirillum, Clostridium cellulolyticum, Clostridium perfringens, Corynebacterium accolens, Corynebacterium diphtheria, Corynebacterium matruchotii, Dinoroseobacter sliibae, Eubacterium dolichum, Gamma proteobacterium, Gluconacetobacter diazotrophicus, Haemophilus parainfluenzae, Haemophilus sputorum, Helicobacter canadensis, Helicobacter cinaedi, Helicobacter mustelae, Ilyobacler polytropus, Kingella kingae, Lactobacillus crispatus, Listeria ivanovii, Listeria monocytogenes, Listeriaceae bacterium, Methylocystis sp., Methylosinus trichosporium, Mobiluncus mulieris, Neisseria bacilliformis, Neisseria cinerea, Neisseria flavescens, Neisseria lactamica. Neisseria sp., Neisseria wadsworthii, Nitrosomonas sp., Parvibaculum lavamentivorans, Pasteurella multocida, Phascolarctobacterium succinatutens, Ralstonia syzygii, Rhodopseudomonas palustris, Rhodovulum sp., Simonsiella muelleri, Sphingomonas sp., Sporolactobacillus vineae, Staphylococcus lugdunensis, Streptococcus sp., Subdoligranulum sp., Tislrella mobilis, Treponema sp., or Verminephrobacter eiseniae.

[0715] A Cas9 molecule, as that term is used herein, refers to a molecule that can interact with a gRNA molecule (e.g., sequence of a domain of a tracr) and, in concert with the gRNA molecule, localize (e.g., target or home) to a site which comprises a target sequence and PAM sequence.

[0716] In an embodiment, the Cas9 molecule is capable of cleaving a target nucleic acid molecule, which may be referred to herein as an active Cas9 molecule. In an embodiment, an active Cas9 molecule, comprises one or more of the following activities: a nickase activity, i.e., the ability to cleave a single strand, e.g., the non-complementary strand or the complementary strand, of a nucleic acid molecule; a double stranded nuclease activity, i.e., the ability to cleave both strands of a double stranded nucleic acid and create a double stranded break, which in an embodiment is the presence of two nickase activities; an endonuclease activity; an exonuclease activity; and a helicase activity, i.e., the ability to unwind the helical structure of a double stranded nucleic acid.

[0717] In an embodiment, an enzymatically active Cas9 molecule cleaves both DNA strands and results in a double stranded break. In an embodiment, a Cas9 molecule cleaves only one strand, e.g., the strand to which the gRNA hybridizes to, or the strand complementary to the strand the gRNA hybridizes with. In an embodiment, an active Cas9 molecule comprises cleavage activity associated with an HNH-like domain. In an embodiment, an active Cas9 molecule comprises cleavage activity associated with an N-terminal RuvC-like domain. In an embodiment, an active Cas9 molecule comprises cleavage activity associated with an HNH-like domain and cleavage activity associated with an N-terminal RuvC-like domain. In an embodiment, an active Cas9 molecule comprises an active, or cleavage competent, HNH-like domain and an inactive, or cleavage incompetent, N-terminal RuvC-like domain. In an embodiment, an active Cas9 molecule comprises an inactive, or cleavage incompetent, HNH-like domain and an active, or cleavage competent, N-terminal RuvC-like domain.

[0718] In an embodiment, the ability of an active Cas9 molecule to interact with and cleave a target nucleic acid is PAM sequence dependent. A PAM sequence is a sequence in the target nucleic acid. In an embodiment, cleavage of the target nucleic acid occurs upstream from the PAM sequence. Active Cas9 molecules from different bacterial species can recognize different sequence motifs (e.g., PAM sequences). In an embodiment, an active Cas9 molecule of S. pyogenes recognizes the sequence motif NGG and directs cleavage of a target nucleic acid sequence 1 to 10, e.g., 3 to 5, base pairs upstream from that sequence. See, e.g., Mali et al, SCIENCE 2013; 339(6121): 823-826. In an embodiment, an active Cas9 molecule of S. thermophilus recognizes the sequence motif NGGNG and NNAG AAW (W=A or T) and directs cleavage of a core target nucleic acid sequence 1 to 10, e.g., 3 to 5, base pairs upstream from these sequences. See, e.g., Horvath et al., SCIENCE 2010; 327(5962): 167-170, and Deveau et al, J BACTERIOL 2008; 190(4): 1390-1400. In an embodiment, an active Cas9 molecule of S. mulans recognizes the sequence motif NGG or NAAR (R-A or G) and directs cleavage of a core target nucleic acid sequence 1 to 10, e.g., 3 to 5 base pairs, upstream from this sequence. See, e.g., Deveau et al., J BACTERIOL 2008; 190(4): 1 390-1400.

[0719] In an embodiment, an active Cas9 molecule of S. aureus recognizes the sequence motif NNGRR (R=A or G) and directs cleavage of a target nucleic acid sequence 1 to 10, e.g., 3 to 5, base pairs upstream from that sequence. See, e.g., Ran F. et al., NATURE, vol. 520, 2015, pp. 186-191. In an embodiment, an active Cas9 molecule of N. meningitidis recognizes the sequence motif NNNNGATT and directs cleavage of a target nucleic acid sequence 1 to 10, e.g., 3 to 5, base pairs upstream from that sequence. See, e.g., Hou et al., PNAS EARLY EDITION 2013, 1-6. The ability of a Cas9 molecule to recognize a PAM sequence can be determined, e.g., using a transformation assay described in Jinek et al, SCIENCE 2012, 337:816.

[0720] Some Cas9 molecules have the ability to interact with a gRNA molecule, and in conjunction with the gRNA molecule home (e.g., targeted or localized) to a core target domain, but are incapable of cleaving the target nucleic acid, or incapable of cleaving at efficient rates. Cas9 molecules having no, or no substantial, cleavage activity may be referred to herein as an inactive Cas9 (an enzymatically inactive Cas9), a dead Cas9, or a dCas9 molecule. For example, an inactive Cas9 molecule can lack cleavage activity or have substantially less, e.g., less than 20, 10, 5, 1 or 0.1% of the cleavage activity of a reference Cas9 molecule, as measured by an assay described herein.

[0721] Exemplary naturally occurring Cas9 molecules are described in Chylinski et al, RNA Biology 2013; 10:5, 727-737. Such Cas9 molecules include Cas9 molecules of a cluster 1 bacterial family, cluster 2 bacterial family, cluster 3 bacterial family, cluster 4 bacterial family, cluster 5 bacterial family, cluster 6 bacterial family, a cluster 7 bacterial family, a cluster 8 bacterial family, a cluster 9 bacterial family, a cluster 10 bacterial family, a cluster 11 bacterial family, a cluster 12 bacterial family, a cluster 13 bacterial family, a cluster 14 bacterial family, a cluster 1 bacterial family, a cluster 16 bacterial family, a cluster 17 bacterial family, a cluster 18 bacterial family, a cluster 19 bacterial family, a cluster 20 bacterial family, a cluster 21 bacterial family, a cluster 22 bacterial family, a cluster 23 bacterial family, a cluster 24 bacterial family, a cluster 25 bacterial family, a cluster 26 bacterial family, a cluster 27 bacterial family, a cluster 28 bacterial family, a cluster 29 bacterial family, a cluster 30 bacterial family, a cluster 31 bacterial family, a cluster 32 bacterial family, a cluster 33 bacterial family, a cluster 34 bacterial family, a cluster 35 bacterial family, a cluster 36 bacterial family, a cluster 37 bacterial family, a cluster 38 bacterial family, a cluster 39 bacterial family, a cluster 40 bacterial family, a cluster 41 bacterial family, a cluster 42 bacterial family, a cluster 43 bacterial family, a cluster 44 bacterial family, a cluster 45 bacterial family, a cluster 46 bacterial family, a cluster 47 bacterial family, a cluster 48 bacterial family, a cluster 49 bacterial family, a cluster 50 bacterial family, a cluster 51 bacterial family, a cluster 52 bacterial family, a cluster 53 bacterial family, a cluster 54 bacterial family, a cluster 55 bacterial family, a cluster 56 bacterial family, a cluster 57 bacterial family, a cluster 58 bacterial family, a cluster 59 bacterial family, a cluster 60 bacterial family, a cluster 61 bacterial family, a cluster 62 bacterial family, a cluster 63 bacterial family, a cluster 64 bacterial family, a cluster 65 bacterial family, a cluster 66 bacterial family, a cluster 67 bacterial family, a cluster 68 bacterial family, a cluster 69 bacterial family, a cluster 70 bacterial family, a cluster 71 bacterial family, a cluster 72 bacterial family, a cluster 73 bacterial family, a cluster 74 bacterial family, a cluster 75 bacterial family, a cluster 76 bacterial family, a cluster 77 bacterial family, or a cluster 78 bacterial family.

[0722] Exemplary naturally occurring Cas9 molecules include a Cas9 molecule of a cluster 1 bacterial family. Examples include a Cas9 molecule of: S. pyogenes (e.g., strain SF370, MGAS 10270, MGAS 10750, MGAS2096, MGAS315, MGAS5005, MGAS6180, MGAS9429, NZ131 and SSI-1), S. thermophilus (e.g., strain LMD-9), S. pseudoporcinus (e.g., strain SPIN 20026), S. mutans (e.g., strain UA 159, NN2025), S. macacae (e.g., strain NCTC1 1558), S. gallolyticus (e.g., strain UCN34, ATCC BAA-2069), S. equines (e.g., strain ATCC 9812, MGCS 124), S. dysgalactiae (e.g., strain GGS 124), S. bovis (e.g., strain ATCC 700338), S. cmginosus (e.g.; strain F021 1), S. agalactiae* (e.g., strain NEM316, A909), Listeria monocytogenes (e.g., strain F6854), Listeria innocua (L. innocua, e.g., strain Clip 11262), Enterococcus italicus (e.g., strain DSM 15952), or Enterococcus faecium (e.g., strain 1,231,408). Additional exemplary Cas9 molecules are a Cas9 molecule of Neisseria meningitidis (Hou et al. PNAS Early Edition 2013, 1-6) and a S. aureus Cas9 molecule.

[0723] In an embodiment, a Cas9 molecule, e.g., an active Cas9 molecule or inactive Cas9 molecule, comprises an amino acid sequence: having 60%, 65%, 70%, 75%, 80%, 85%, 90%, 95%, 96%, 97%, 98%, or 99% homology with; differs at no more than 1%, 2%, 5%, 10%, 15%, 20%, 30%, or 40% of the amino acid residues when compared with; differs by at least 1, 2, 5, 10 or 20 amino acids but by no more than 100, 80, 70, 60, 50, 40 or 30 amino acids from; or is identical to; any Cas9 molecule sequence described herein or a naturally occurring Cas9 molecule sequence, e.g., a Cas9 molecule from a species listed herein or described in Chylinski et al., RNA Biology 2013, 10:5, T2T,1 Hou et al. PNAS Early Edition 2013, 1-6.

[0724] In an embodiment, a Cas9 molecule comprises an amino acid sequence having 60%, 65%, 70%, 75%, 80%, 85%, 90%, 95%, 96%, 97%, 98%, or 99% homology with; differs at no more than 1%, 2%, 5%, 10%, 15%, 20%, 30%, or 40% of the amino acid residues when compared with; differs by at least 1, 2, 5, 10 or 20 amino acids but by no more than 100, 80, 70, 60, 50, 40 or 30 amino acids from; or is identical to; S. pyogenes Cas9:

```
(SEQ ID NO: 6611)
[sequence omitted]
                                1365
```

[0725] In embodiments, the Cas9 molecule is a S. pyogenes Cas9 variant of SEQ ID NO: 6611 that includes one or more mutations to positively charged amino acids (e.g., lysine, arginine or histidine) that introduce an uncharged or nonpolar amino acid, e.g., alanine, at said position. In embodiments, the mutation is to one or more positively charged amino acids in the nt-groove of Cas9. In embodiments, the Cas9 molecule is a S. pyogenes Cas9 variant of SEQ ID NO: 6611 that includes a mutation at position 855 of SEQ ID NO: 6611, for example a mutation to an uncharged amino acid, e.g., alanine, at position 855 of SEQ ID NO: 6611. In embodiments, the Cas9 molecule has a mutation only at position 855 of SEQ ID NO: 6611, relative to SEQ ID NO: 6611, e.g., to an uncharged amino acid, e.g., alanine. In embodiments, the Cas9 molecule is a S. pyogenes Cas9 variant of SEQ ID NO: 6611 that includes a mutation at position 810, a mutation at position 1003, and/or a mutation at position 1060 of SEQ ID NO: 6611, for example a mutation to alanine at position 810, position 1003, and/or position 1060 of SEQ ID NO: 6611. In embodiments, the Cas9 molecule has a mutation only at position 810, position 1003, and position 1060 of SEQ ID NO: 6611, relative to SEQ ID NO: 6611, e.g., where each mutation is to an uncharged amino acid, for example, alanine. In embodiments, the Cas9 molecule is a S. pyogenes Cas9 variant of SEQ ID NO: 6611 that includes a mutation at position 848, a mutation at position 1003, and/or a mutation at position 1060 of SEQ ID NO: 6611, for example a mutation to alanine at position 848, position 1003, and/or position 1060 of SEQ ID NO: 6611. In embodiments, the Cas9 molecule has a mutation only at position 848, position 1003, and position 1060 of SEQ ID NO: 6611, relative to SEQ ID NO: 6611, e.g., where each mutation is to an uncharged amino acid, for example, alanine. In embodiments, the Cas9 molecule is a Cas9 molecule as described in Slaymaker et al., Science Express, available online Dec. 1, 2015 at Science DOI: 10.1126/science.aad5227.

[0726] In embodiments, the Cas9 molecule is a S. pyogenes Cas9 variant of SEQ ID NO: 6611 that includes one or more mutations. In embodiments, the Cas9 variant comprises a mutation at position 80 of SEQ ID NO: 6611, e.g., includes a leucine at position 80 of SEQ ID NO: 6611 (i.e., comprises, e.g., consists of, SEQ ID NO: 6611 with a C80L mutation). In embodiments, the Cas9 variant comprises a mutation at position 574 of SEQ ID NO: 6611, e.g., includes a glutamic acid at position 574 of SEQ ID NO: 6611 (i.e., comprises, e.g., consists of, SEQ ID NO: 6611 with a C574 E mutation). In embodiments, the Cas9 variant comprises a mutation at position 80 and a mutation at position 574 of SEQ ID NO: 6611, e.g., includes a leucine at position 80 of SEQ ID NO: 6611, and a glutamic acid at position 574 of SEQ ID NO: 6611 (i.e., comprises, e.g., consists of, SEQ ID NO: 6611 with a C80L mutation and a C574 E mutation). Without being bound by theory, it is believed that such mutations improve the solution properties of the Cas9 molecule.

[0727] In embodiments, the Cas9 molecule is a S. pyogenes Cas9 variant of SEQ ID NO: 6611 that includes one or more mutations. In embodiments, the Cas9 variant comprises a mutation at position 147 of SEQ ID NO: 6611, e.g., includes a tyrosine at position 147 of SEQ ID NO: 6611 (i.e., comprises, e.g., consists of, SEQ ID NO: 6611 with a D147Y mutation). In embodiments, the Cas9 variant comprises a mutation at position 411 of SEQ ID NO: 6611, e.g., includes a threonine at position 411 of SEQ ID NO: 6611 (i.e., comprises, e.g., consists of, SEQ ID NO: 6611 with a P411T mutation). In embodiments, the Cas9 variant comprises a mutation at position 147 and a mutation at position 411 of SEQ ID NO: 6611, e.g., includes a tyrosine at position 147 of SEQ ID NO: 6611, and a threonine at position 411 of SEQ ID NO: 6611 (i.e., comprises, e.g., consists of, SEQ ID NO: 6611 with a D147Y mutation and a P411T mutation). Without being bound by theory, it is believed that such mutations improve the targeting efficiency of the Cas9 molecule, e.g., in yeast.

[0728] In embodiments, the Cas9 molecule is a S. pyogenes Cas9 variant of SEQ ID NO: 6611 that includes one or more mutations. In embodiments, the Cas9 variant comprises a mutation at position 1135 of SEQ ID NO: 6611, e.g., includes a glutamic acid at position 1135 of SEQ ID NO: 6611 (i.e., comprises, e.g., consists of, SEQ ID NO: 6611 with a D1135 E mutation). Without being bound by theory, it is believed that such mutations improve the selectivity of the Cas9 molecule for the NGG PAM sequence versus the NAG PAM sequence.

[0729] In embodiments, the Cas9 molecule is a S. pyogenes Cas9 variant of SEQ ID NO: 6611 that includes one or more mutations that introduce an uncharged or nonpolar amino acid, e.g., alanine, at certain positions. In embodiments, the Cas9 molecule is a S. pyogenes Cas9 variant of SEQ ID NO: 6611 that includes a mutation at position 497, a mutation at position 661, a mutation at position 695 and/or a mutation at position 926 of SEQ ID NO: 6611, for example a mutation to alanine at position 497, position 661, position 695 and/or position 926 of SEQ ID NO: 6611. In embodiments, the Cas9 molecule has a mutation only at position 497, position 661, position 695, and position 926 of SEQ ID NO: 6611, relative to SEQ ID NO: 6611, e.g., where each mutation is to an uncharged amino acid, for example, alanine. Without being bound by theory, it is believed that such mutations reduce the cutting by the Cas9 molecule at off-target sites

[0730] It will be understood that the mutations described herein to the Cas9 molecule may be combined, and may be combined with any of the fusions or other modifications described herein, and the Cas9 molecule tested in the assays described herein.

[0731] Various types of Cas molecules can be used to practice the inventions disclosed herein. In some embodiments, Cas molecules of Type II Cas systems are used. In other embodiments, Cas molecules of other Cas systems are used. For example, Type I or Type III Cas molecules may be used. Exemplary Cas molecules (and Cas systems) are described, e.g., in Haft et al, PLoS COMPUTATIONAL BIOLOGY 2005, 1(6): e60 and Makarova et al, NATURE REVIEW MICROBIOLOGY 2011, 9:467-477, the contents of both references are incorporated herein by reference in their entirety.

[0732] In an embodiment, the Cas9 molecule comprises one or more of the following activities: a nickase activity; a double stranded cleavage activity (e.g., an endonuclease and/or exonuclease activity); a helicase activity; or the ability, together with a gRNA molecule, to localize to a target nucleic acid.

### Altered Cas9 Molecules

[0733] Naturally occurring Cas9 molecules possess a number of properties, including: nickase activity, nuclease activity (e.g., endonuclease and/or exonuclease activity); helicase activity; the ability to associate functionally with a gRNA molecule; and the ability to target (or localize to) a site on a nucleic acid (e.g., PAM recognition and specificity). In an embodiment, a Cas9 molecules can include all or a subset of these properties. In typical embodiments, Cas9 molecules have the ability to interact with a gRNA molecule and, in concert with the gRNA molecule, localize to a site in a nucleic acid. Other activities, e.g., PAM specificity, cleavage activity, or helicase activity can vary more widely in Cas9 molecules.

[0734] Cas9 molecules with desired properties can be made in a number of ways, e.g., by alteration of a parental, e.g., naturally occurring Cas9 molecules to provide an altered Cas9 molecule having a desired property. For example, one or more mutations or differences relative to a parental Cas9 molecule can be introduced. Such mutations and differences comprise: substitutions (e.g., conservative substitutions or substitutions of non-essential amino acids); insertions; or deletions. In an embodiment, a Cas9 molecule can comprises one or more mutations or differences, e.g., at least 1, 2, 3, 4, 5, 10, 15, 20, 30, 40 or 50 mutations but less than 200, 100, or 80 mutations relative to a reference Cas9 molecule.

[0735] In an embodiment, a mutation or mutations do not have a substantial effect on a Cas9 activity, e.g. a Cas9 activity described herein. In an embodiment, a mutation or mutations have a substantial effect on a Cas9 activity, e.g. a Cas9 activity described herein. In an embodiment, exemplary activities comprise one or more of PAM specificity, cleavage activity, and helicase activity. A mutation(s) can be present, e.g., in: one or more RuvC-like domain, e.g., an N-terminal RuvC-like domain; an HNH-like domain; a region outside the RuvC-like domains and the HNH-like domain. In some embodiments, a mutation(s) is present in an N-terminal RuvC-like domain. In some embodiments, a mutation(s) is present in an HNH-like domain. In some embodiments, mutations are present in both an N-terminal RuvC-like domain and an HNH-like domain.

[0736] Whether or not a particular sequence, e.g., a substitution, may affect one or more activity, such as targeting activity, cleavage activity, etc, can be evaluated or predicted, e.g., by evaluating whether the mutation is conservative or by the method described in Section III. In an embodiment, a “non-essential” amino acid residue, as used in the context of a Cas9 molecule, is a residue that can be altered from the wild-type sequence of a Cas9 molecule, e.g., a naturally occurring Cas9 molecule, e.g., an active Cas9 molecule, without abolishing or more preferably, without substantially altering a Cas9 activity (e.g., cleavage activity), whereas changing an “essential” amino acid residue results in a substantial loss of activity (e.g., cleavage activity).

Cas9 Molecules with Altered PAM Recognition or No PAM Recognition

[0737] Naturally occurring Cas9 molecules can recognize specific PAM sequences, for example the PAM recognition sequences described above for S. pyogenes, S. thermophilus, S. mutans, S. aureus and N. meningitidis.

[0738] In an embodiment, a Cas9 molecule has the same PAM specificities as a naturally occurring Cas9 molecule. In other embodiments, a Cas9 molecule has a PAM specificity not associated with a naturally occurring Cas9 molecule, or a PAM specificity not associated with the naturally occurring Cas9 molecule to which it has the closest sequence homology. For example, a naturally occurring Cas9 molecule can be altered, e.g., to alter PAM recognition, e.g., to alter the PAM sequence that the Cas9 molecule recognizes to decrease off target sites and/or improve specificity; or eliminate a PAM recognition requirement. In an embodiment, a Cas9 molecule can be altered, e.g., to increase length of PAM recognition sequence and/or improve Cas9 specificity to high level of identity to decrease off target sites and increase specificity. In an embodiment, the length of the PAM recognition sequence is at least 4, 5, 6, 7, 8, 9, 10 or 15 amino acids in length. Cas9 molecules that recognize different PAM sequences and/or have reduced off-target activity can be generated using directed evolution. Exemplary methods and systems that can be used for directed evolution of Cas9 molecules are described, e.g., in Esvelt el al, Nature 2011, 472(7344): 499-503. Candidate Cas9 molecules can be evaluated, e.g., by methods described herein.

### Non-Cleaving and Modified-Cleavage Cas9 Molecules

[0739] In an embodiment, a Cas9 molecule comprises a cleavage property that differs from naturally occurring Cas9 molecules, e.g., that differs from the naturally occurring Cas9 molecule having the closest homology. For example, a Cas9 molecule can differ from naturally occurring Cas9 molecules, e.g., a Cas9 molecule of S. pyogenes, as follows: its ability to modulate, e.g., decreased or increased, cleavage of a double stranded break (endonuclease and/or exonuclease activity), e.g., as compared to a naturally occurring Cas9 molecule (e.g., a Cas9 molecule of S. pyogenes); its ability to modulate, e.g., decreased or increased, cleavage of a single strand of a nucleic acid, e.g., a non-complimentary strand of a nucleic acid molecule or a complementary strand of a nucleic acid molecule (nickase activity), e.g., as compared to a naturally occurring Cas9 molecule (e.g., a Cas9 molecule of S. pyogenes); or the ability to cleave a nucleic acid molecule, e.g., a double stranded or single stranded nucleic acid molecule, can be eliminated.

### Modified Cleavage Active Cas9 Molecules

[0740] In an embodiment, an active Cas9 molecule comprises one or more of the following activities: cleavage activity associated with an N-terminal RuvC-like domain; cleavage activity associated with an HNH-like domain; cleavage activity associated with an HNH domain and cleavage activity associated with an N-terminal RuvC-like domain.

[0741] In an embodiment, the Cas9 molecule is a Cas9 nickase, e.g., cleaves only a single strand of DNA. In an embodiment, the Cas9 nickase includes a mutation at position 10 and/or a mutation at position 840 of SEQ ID NO: 6611, e.g., comprises a D10A and/or H840A mutation to SEQ ID NO: 6611.

### Non-Cleaving Inactive Cas9 Molecules

[0742] In an embodiment, the altered Cas9 molecule is an inactive Cas9 molecule which does not cleave a nucleic acid molecule (either double stranded or single stranded nucleic acid molecules) or cleaves a nucleic acid molecule with significantly less efficiency, e.g., less than 20, 10, 5, 1 or 0.1% of the cleavage activity of a reference Cas9 molecule, e.g., as measured by an assay described herein. The reference Cas9 molecule can by a naturally occurring unmodified Cas9 molecule, e.g., a naturally occurring Cas9 molecule such as a Cas9 molecule of S. pyogenes, S. thermophilus, S. aureus or N. meningitidis. In an embodiment, the reference Cas9 molecule is the naturally occurring Cas9 molecule having the closest sequence identity or homology. In an embodiment, the inactive Cas9 molecule lacks substantial cleavage activity associated with an N-terminal RuvC-like domain and cleavage activity associated with an HNH-like domain.

[0743] In an embodiment, the Cas9 molecule is dCas9. Tsai et al. (2014), Nat. Biotech. 32:569-577.

[0744] A catalytically inactive Cas9 molecule may be fused with a transcription repressor. An inactive Cas9 fusion protein complexes with a gRNA and localizes to a DNA sequence specified by gRNA's targeting domain, but, unlike an active Cas9, it will not cleave the target DNA. Fusion of an effector domain, such as a transcriptional repression domain, to an inactive Cas9 enables recruitment of the effector to any DNA site specified by the gRNA. Site specific targeting of a Cas9 fusion protein to a promoter region of a gene can block or affect polymerase binding to the promoter region, for example, a Cas9 fusion with a transcription factor (e.g., a transcription activator) and/or a transcriptional enhancer binding to the nucleic acid to increase or inhibit transcription activation. Alternatively, site specific targeting of a Cas9-fusion to a transcription repressor to a promoter region of a gene can be used to decrease transcription activation.

[0745] Transcription repressors or transcription repressor domains that may be fused to an inactive Cas9 molecule can include ruppel associated box (KRAB or SKD), the Mad mSIN3 interaction domain (SID) or the ERF repressor domain (ERD).

[0746] In another embodiment, an inactive Cas9 molecule may be fused with a protein that modifies chromatin. For example, an inactive Cas9 molecule may be fused to heterochromatin protein 1 (HPl), a histone lysine methyltransferase (e.g., SUV39H 1, SUV39H2, G9A, ESET/SETDB1, Pr-SET7/8, SUV4-20H 1, RIZ1), a histone lysine demethylates (e.g., LSD1/BHC1 10, SpLsdl/Sw, 1/Safi 10, Su(var)3-3, JMJD2A/JHDM3A, JMJD2B, JMJD2C/GASC1, JMJD2D, Rph 1, JARID 1 A/RBP2, JARI DIB/PLU-I, JAR1D 1C/SMCX, JARID1 D/SMCY, Lid, Jhn2, Jmj2), a histone lysine deacetylases (e.g., HDAC1, HDAC2, HDAC3, HDAC8, Rpd3, Hos 1, Cir6, HDAC4, HDAC5, HDAC7, HDAC9, Hda1, Cir3, SIRT 1, SIRT2, Sir2, Hst 1, Hst2, Hst3, Hst4, HDAC 1 1) and a DNA methylases (DNMT1, DNMT2a/DMNT3b, MET1). An inactive Cas9-chromatin modifying molecule fusion protein can be used to alter chromatin status to reduce expression a target gene.

[0747] The heterologous sequence (e.g., the transcription repressor domain) may be fused to the N- or C-terminus of the inactive Cas9 protein. In an alternative embodiment, the heterologous sequence (e.g., the transcription repressor domain) may be fused to an internal portion (i.e., a portion other than the N-terminus or C-terminus) of the inactive Cas9 protein.

[0748] The ability of a Cas9 molecule/gRNA molecule complex to bind to and cleave a target nucleic acid can be evaluated, e.g., by the methods described herein in Section III. The activity of a Cas9 molecule, e.g., either an active Cas9 or a inactive Cas9, alone or in a complex with a gRNA molecule may also be evaluated by methods well-known in the art, including, gene expression assays and chromatin-based assays, e.g., chromatin immunoprecipitation (ChiP) and chromatin in vivo assay (CiA).

### Other Cas9 Molecule Fusions

[0749] In embodiments, the Cas9 molecule, e.g, a Cas9 of S. pyogenes, may additionally comprise one or more amino acid sequences that confer additional activity.

[0750] In some aspects, the Cas9 molecule may comprise one or more nuclear localization sequences (NLSs), such as at least 1, 2, 3, 4, 5, 6, 7, 8, 9, 10, or more NLSs. In some embodiments, the Cas9 molecule comprises at least 1, 2, 3, 4, 5, 6, 7, 8, 9, 10, or more NLSs at or near the amino-terminus, at least 1, 2, 3, 4, 5, 6, 7, 8, 9, 10, or more NLSs at or near the carboxy-terminus, or a combination of these (e.g. one or more NLS at the amino-terminus and one or more NLS at the carboxy terminus). When more than one NLS is present, each may be selected independently of the others, such that a single NLS may be present in more than one copy and/or in combination with one or more other NLSs present in one or more copies. In some embodiments, an NLS is considered near the N- or C-terminus when the nearest amino acid of the NLS is within about 1, 2, 3, 4, 5, 10, 15, 20, 25, 30, 40, 50, or more amino acids along the polypeptide chain from the N- or C-terminus. Typically, an NLS consists of one or more short sequences of positively charged lysines or arginines exposed on the protein surface, but other types of NLS are known. Non-limiting examples of NLSs include an NLS sequence comprising or derived from: the NLS of the SV40 virus large T-antigen, having the amino acid sequence PKKKRKV (SEQ ID NO: 6612); the NLS from nucleoplasmin (e.g. the nucleoplasmin bipartite NLS with the sequence KRPAATKKAGQAKKKK (SEQ ID NO: 6613); the c-myc NLS having the amino acid sequence PAAKRVKLD (SEQ ID NO: 6614) or RQRRNELKRSP (SEQ ID NO: 6615); the hRNPA1 M9 NLS having the sequence NQSSNFGPMKGGNFGGRSSGPYGGGGQYFAKPRNQGGY (SEQ ID NO: 6616); the sequence RMRIZFKNKGKDTAELRRRRVEVSVELRKAKKDEQILKRRNV (SEQ ID NO: 6617) of the IBB domain from importin-alpha; the sequences VSRKRPRP (SEQ ID NO: 6618) and PPKKARED (SEQ ID NO: 6619) of the myoma T protein; the sequence PQPKKKPL (SEQ ID NO: 6620) of human p53; the sequence SALIKKKKKMAP (SEQ ID NO: 6621) of mouse c-ab1 IV; the sequences DRLRR (SEQ ID NO: 6622) and PKQKKRK (SEQ ID NO: 6623) of the influenza virus NS1; the sequence RKLKKKIKKL (SEQ ID NO: 6624) of the Hepatitis virus delta antigen; the sequence REKKKFLKRR (SEQ ID NO: 6625) of the mouse M×1 protein; the sequence KRKGDEVDGVDEVAKKKSKK (SEQ ID NO: 6626) of the human poly(ADP-ribose) polymerase; and the sequence RKCLQAGMNLEARKTKK (SEQ ID NO: 6627) of the steroid hormone receptors (human) glucocorticoid. Other suitable NLS sequences are known in the art (e.g., Sorokin, Biochemistry (Moscow) (2007) 72:13, 1439-1457; Lange J Biol Chem. (2007) 282:8, 5101-5).

[0751] In some aspects, the Cas9 molecule may comprise one or more amino acid sequences that allow the Cas9 molecule to be specifically recognized, for example a tag. In one embodiment, the tag is a Histidine tag, e.g., a histidine tag comprising at least 3, 4, 5, 6, 7, 8, 9, 10 or more histidine amino acids (SEQ ID NO: 10800). In embodiments, the histidine tag is a His6 tag (six histidines) (SEQ ID NO: 10795). In other embodiments, the histidine tag is a His8 tag (eight histidines). In embodiments, the histidine tag may be separated from one or more other portions of the Cas9 molecule by a linker. In embodiments, the linker is GGS. An example of such a fusion is the Cas9 molecule iProt106520.

[0752] In some aspects, the Cas9 molecule may comprise one or more amino acid sequences that are recognized by a protease (e.g., comprise a protease cleavage site). In embodiments, the cleavage site is the tobacco etch virus (TEV) cleavage site, e.g., comprises the sequence ENLYFQG (SEQ ID NO: 7810). In some aspects the protease cleavage site, e.g., the TEV cleavage site is disposed between a tag, e.g., a His tag, e.g., a His6 (SEQ ID NO: 10795) or His8 tag (SEQ ID NO: 10796), and the remainder of the Cas9 molecule. Without being bound by theory it is believed that such introduction will allow for the use of the tag for, e.g., purification of the Cas9 molecule, and then subsequent cleavage so the tag does not interfere with the Cas9 molecule function.

[0753] In embodiments, the Cas9 molecule (e.g., a Cas9 molecule as described herein) comprises an N-terminal NLS, and a C-terminal NLS (e.g., comprises, from N- to C-terminal NLS-Cas9-NLS), e.g., wherein each NLS is an SV40 NLS (PKKKRKV (SEQ ID NO: 6612)). In embodiments, the Cas9 molecule (e.g., a Cas9 molecule as described herein) comprises an N-terminal NLS, a C-terminal NLS, and a C-terminal His6 tag (SEQ ID NO: 10795) (e.g., comprises, from N- to C-terminal NLS-Cas9-NLS-His tag), e.g., wherein each NLS is an SV40 NLS (PKKKRKV (SEQ ID NO: 6612)). In embodiments, the Cas9 molecule (e.g., a Cas9 molecule as described herein) comprises an N-terminal His tag (e.g., His6 tag (SEQ ID NO: 10795)), an N-terminal NLS, and a C-terminal NLS (e.g., comprises, from N- to C-terminal His tag-NLS-Cas9-NLS), e.g., wherein each NLS is an SV40 NLS (PKKKRKV (SEQ ID NO: 6612)). In embodiments, the Cas9 molecule (e.g., a Cas9 molecule as described herein) comprises an N-terminal NLS and a C-terminal His tag (e.g., His6 tag (SEQ ID NO: 10795)) (e.g., comprises from N- to C-terminal His tag-Cas9-NLS), e.g., wherein the NLS is an SV40 NLS (PKKKRKV (SEQ ID NO: 6612)). In embodiments, the Cas9 molecule (e.g., a Cas9 molecule as described herein) comprises an N-terminal His tag (e.g., His6 tag (SEQ ID NO: 10795)) and a C-terminal NLS (e.g., comprises from N- to C-terminal NLS-Cas9-His tag), e.g., wherein the NLS is an SV40 NLS (PKKKRKV (SEQ ID NO: 6612)). In embodiments, the Cas9 molecule (e.g., a Cas9 molecule as described herein) comprises an N-terminal His tag (e.g., His8 tag (SEQ ID NO: 10796)), an N-terminal cleavage domain (e.g., a tobacco etch virus (TEV) cleavage domain (e.g., comprises the sequence ENLYFQG (SEQ ID NO: 7810))), an N-terminal NLS (e.g., an SV40 NLS; SEQ ID NO: 6612), and a C-terminal NLS (e.g., an SV40 NLS; SEQ ID NO: 6612) (e.g., comprises from N- to C-terminal His tag-TEV-NLS-Cas9-NLS). In any of the aforementioned embodiments the Cas9 has the sequence of SEQ ID NO: 6611. Alternatively, in any of the aforementioned embodiments, the Cas9 has a sequence of a Cas9 variant of SEQ ID NO: 6611, e.g., as described herein. In any of the aforementioned embodiments, the Cas9 molecule comprises a linker between the His tag and another portion of the molecule, e.g., a GGS linker. Amino acid sequences of exemplary Cas9 molecules described above are provided below. “iProt” identifiers match those in FIG. 60.

iProt105026 (also referred to as iProt106154, iProt106331, iProt106545,
and PID426303, depending on the preparation of the protein)(SEQ ID NO:
7821):
MAPKKKRKVD KKYSIGLDIG TNSVGWAVIT DEYKVPSKKF KVLGNTDRHS IKKNLIGALL
FDSGETAEAT RLKRTARRRY TRRKNRICYL QEIFSNEMAK VDDSFFHRLE ESFLVEEDKK
HERHPIFGNI VDEVAYHEKY PTIYHLRKKL VDSTDKADLR LIYLALAHMI KFRGHFLIEG
DLNPDNSDVD KLFIQLVQTY NQLFEENPIN ASGVDAKAIL SARLSKSRRL ENLIAQLPGE
KKNGLFGNLI ALSLGLTPNF KSNFDLAEDA KLQLSKDTYD DDLDNLLAQI GDQYADLFLA
AKNLSDAILL SDILRVNTEI TKAPLSASMI KRYDEHHQDL TLLKALVRQQ LPEKYKEIFF
DQSKNGYAGY IDGGASQEEF YKFIKPILEK MDGTEELLVK LNREDLLRKQ RTFDNGSIPH
QIHLGELHAI LRRQEDFYPF LKDNREKIEK ILTFRIPYYV GPLARGNSRF AWMTRKSEET
ITPWNFEEVV DKGASAQSFI ERMTNFDKNL PNEKVLPKHS LLYEYFTVYN ELTKVKYVTE
GMRKPAFLSG EQKKAIVDLL FKTNRKVTVK QLKEDYFKKI ECFDSVEISG VEDRFNASLG
TYHDLLKIIK DKDFLDNEEN EDILEDIVLT LTLFEDREMI EERLKTYAHL FDDKVMKQLK
RRRYTGWGRL SRKLINGIRD KQSGKTILDF LKSDGFANRN FMQLIHDDSL TFKEDIQKAQ
VSGQGDSLHE HIANLAGSPA IKKGILQTVK VVDELVKVMG RHKPENIVIE MARENQTTQK
GQKNSRERMK RIEEGIKELG SQILKEHPVE NTQLQNEKLY LYYLQNGRDM YVDQELDINR
LSDYDVDHIV PQSFLKDDSI DNKVLTRSDK NRGKSDNVPS EEVVKKMKNY WRQLLNAKLI
TQRKFDNLTK AERGGLSELD KAGFIKRQLV ETRQITKHVA QILDSRMNTK YDENDKLIRE
VKVITLKSKL VSDFRKDFQF YKVREINNYH HAHDAYLNAV VGTALIKKYP KLESEFVYGD
YKVYDVRKMI AKSEQEIGKA TAKYFFYSNI MNFFKTEITL ANGEIRKRPL IETNGETGEI
VWDKGRDFAT VRKVLSMPQV NIVKKTEVQT GGFSKESILP KRNSDKLIAR KKDWDPKKYG
GFDSPTVAYS VLVVAKVEKG KSKKLKSVKE LLGITIMERS SFEKNPIDFL EAKGYKEVKK
DLIIKLPKYS LFELENGRKR MLASAGELQK GNELALPSKY VNFLYLASHY EKLKGSPEDN
EQKQLFVEQH KHYLDEIIEQ ISEFSKRVIL ADANLDKVLS AYNKHRDKPI REQAENIIHL
FTLTNLGAPA AFKYFDTTID RKRYTSTKEV LDATLIHQSI TGLYETRIDL SQLGGDSRAD
PKKKRKVHHH HHH
iProt106518 (SEQ ID NO: 7822):
MAPKKKRKVD KKYSIGLDIG TNSVGWAVIT DEYKVPSKKF KVLGNTDRHS IKKNLIGALL
FDSGETAEAT RLKRTARRRY TRRKNRILYL QEIFSNEMAK VDDSFFHRLE ESFLVEEDKK
HERHPIFGNI VDEVAYHEKY PTIYHLRKKL VDSTDKADLR LIYLALAHMI KFRGHFLIEG
DLNPDNSDVD KLFIQLVQTY NQLFEENPIN ASGVDAKAIL SARLSKSRRL ENLIAQLPGE
KKNGLFGNLI ALSLGLTPNF KSNFDLAEDA KLQLSKDTYD DDLDNLLAQI GDQYADLFLA
AKNLSDAILL SDILRVNTEI TKAPLSASMI KRYDEHHQDL TLLKALVRQQ LPEKYKEIFF
DQSKNGYAGY IDGGASQEEF YKFIKPILEK MDGTEELLVK LNREDLLRKQ RTFDNGSIPH
QIHLGELHAI LRRQEDFYPF LKDNREKIEK ILTFRIPYYV GPLARGNSRF AWMTRKSEET
ITPWNFEEVV DKGASAQSFI ERMTNFDKNL PNEKVLPKHS LLYEYFTVYN ELTKVKYVTE
GMRKPAFLSG EQKKAIVDLL FKTNRKVTVK QLKEDYFKKI EEFDSVEISG VEDRFNASLG
TYHDLLKIIK DKDFLDNEEN EDILEDIVLT LTLFEDREMI EERLKTYAHL FDDKVMKQLK
RRRYTGWGRL SRKLINGIRD KQSGKTILDF LKSDGFANRN FMQLIHDDSL TFKEDIQKAQ
VSGQGDSLHE HIANLAGSPA IKKGILQTVK VVDELVKVMG RHKPENIVIE MARENQTTQK
GQKNSRERMK RIEEGIKELG SQILKEHPVE NTQLQNEKLY LYYLQNGRDM YVDQELDINR
LSDYDVDHIV PQSFLKDDSI DNKVLTRSDK NRGKSDNVPS EEVVKKMKNY WRQLLNAKLI
TQRKFDNLTK AERGGLSELD KAGFIKRQLV ETRQITKHVA QILDSRMNTK YDENDKLIRE
VKVITLKSKL VSDFRKDFQF YKVREINNYH HAHDAYLNAV VGTALIKKYP KLESEFVYGD
YKVYDVRKMI AKSEQEIGKA TAKYFFYSNI MNFFKTEITL ANGEIRKRPL IETNGETGEI
VWDKGRDFAT VRKVLSMPQV NIVKKTEVQT GGFSKESILP KRNSDKLIAR KKDWDPKKYG
GFDSPTVAYS VLVVAKVEKG KSKKLKSVKE LLGITIMERS SFEKNPIDFL EAKGYKEVKK
DLIIKLPKYS LFELENGRKR MLASAGELQK GNELALPSKY VNFLYLASHY EKLKGSPEDN
EQKQLFVEQH KHYLDEIIEQ ISEFSKRVIL ADANLDKVLS AYNKHRDKPI REQAENIIHL
FTLTNLGAPA AFKYFDTTID RKRYTSTKEV LDATLIHQSI TGLYETRIDL SQLGGDSRAD
PKKKRKVHHH HHH
iProt106519 (SEQ ID NO: 7823):
MGSSHHHHHH HHENLYFQGS MDKKYSIGLD IGTNSVGWAV ITDEYKVPSK KFKVLGNTDR
HSIKKNLIGA LLFDSGETAE ATRLKRTARR RYTRRKNRIC YLQEIFSNEM AKVDDSFFHR
LEESFLVEED KKHERHPIFG NIVDEVAYHE KYPTIYHLRK KLVDSTDKAD LRLIYLALAH
MIKFRGHFLI EGDLNPDNSD VDKLFIQLVQ TYNQLFEENP INASGVDAKA ILSARLSKSR
RLENLIAQLP GEKKNGLFGN LIALSLGLTP NFKSNFDLAE DAKLQLSKDT YDDDLDNLLA
QIGDQYADLF LAAKNLSDAI LLSDILRVNT EITKAPLSAS MIKRYDEHHQ DLTLLKALVR
QQLPEKYKEI FFDQSKNGYA GYIDGGASQE EFYKFIKPIL EKMDGTEELL VKLNREDLLR
KQRTFDNGSI PHQIHLGELH AILRRQEDFY PFLKDNREKI EKILTFRIPY YVGPLARGNS
RFAWMTRKSE ETITPWNFEE VVDKGASAQS FIERMTNFDK NLPNEKVLPK HSLLYEYFTV
YNELTKVKYV TEGMRKPAFL SGEQKKAIVD LLFKTNRKVT VKQLKEDYFK KIECFDSVEI
SGVEDRFNAS LGTYHDLLKI IKDKDFLDNE ENEDILEDIV LTLTLFEDRE MIEERLKTYA
HLFDDKVMKQ LKRRRYTGWG RLSRKLINGI RDKQSGKTIL DFLKSDGFAN RNFMQLIHDD
SLTFKEDIQK AQVSGQGDSL HEHIANLAGS PAIKKGILQT VKVVDELVKV MGRHKPENIV
IEMARENQTT QKGQKNSRER MKRIEEGIKE LGSQILKEHP VENTQLQNEK LYLYYLQNGR
DMYVDQELDI NRLSDYDVDH IVPQSFLKDD SIDNKVLTRS DKNRGKSDNV PSEEVVKKMK
NYWRQLLNAK LITQRKFDNL TKAERGGLSE LDKAGFIKRQ LVETRQITKH VAQILDSRMN
TKYDENDKLI REVKVITLKS KLVSDFRKDF QFYKVREINN YHHAHDAYLN AVVGTALIKK
YPKLESEFVY GDYKVYDVRK MIAKSEQEIG KATAKYFFYS NIMNFFKTEI TLANGEIRKR
PLIETNGETG EIVWDKGRDF ATVRKVLSMP QVNIVKKTEV QTGGFSKESI LPKRNSDKLI
ARKKDWDPKK YGGFDSPTVA YSVLVVAKVE KGKSKKLKSV KELLGITIME RSSFEKNPID
FLEAKGYKEV KKDLIIKLPK YSLFELENGR KRMLASAGEL QKGNELALPS KYVNFLYLAS
HYEKLKGSPE DNEQKQLFVE QHKHYLDEII EQISEFSKRV ILADANLDKV LSAYNKHRDK
PIREQAENII HLFTLTNLGA PAAFKYFDTT IDRKRYTSTK EVLDATLIHQ SITGLYETRI
DLSQLGGDGG GSPKKKRKV
iProt106520 (SEQ ID NO: 7824):
MAHHHHHHGG SPKKKRKVDK KYSIGLDIGT NSVGWAVITD EYKVPSKKFK VLGNTDRHSI
KKNLIGALLF DSGETAEATR LKRTARRRYT RRKNRICYLQ EIFSNEMAKV DDSFFHRLEE
SFLVEEDKKH ERHPIFGNIV DEVAYHEKYP TIYHLRKKLV DSTDKADLRL IYLALAHMIK
FRGHFLIEGD LNPDNSDVDK LFIQLVQTYN QLFEENPINA SGVDAKAILS ARLSKSRRLE
NLIAQLPGEK KNGLFGNLIA LSLGLTPNFK SNFDLAEDAK LQLSKDTYDD DLDNLLAQIG
DQYADLFLAA KNLSDAILLS DILRVNTEIT KAPLSASMIK RYDEHHQDLT LLKALVRQQL
PEKYKEIFFD QSKNGYAGYI DGGASQEEFY KFIKPILEKM DGTEELLVKL NREDLLRKQR
TFDNGSIPHQ IHLGELHAIL RRQEDFYPFL KDNREKIEKI LTFRIPYYVG PLARGNSRFA
WMTRKSEETI TPWNFEEVVD KGASAQSFIE RMTNFDKNLP NEKVLPKHSL LYEYFTVYNE
LTKVKYVTEG MRKPAFLSGE QKKAIVDLLF KTNRKVTVKQ LKEDYFKKIE CFDSVEISGV
EDRFNASLGT YHDLLKIIKD KDFLDNEENE DILEDIVLTL TLFEDREMIE ERLKTYAHLF
DDKVMKQLKR RRYTGWGRLS RKLINGIRDK QSGKTILDFL KSDGFANRNF MQLIHDDSLT
FKEDIQKAQV SGQGDSLHEH IANLAGSPAI KKGILQTVKV VDELVKVMGR HKPENIVIEM
ARENQTTQKG QKNSRERMKR IEEGIKELGS QILKEHPVEN TQLQNEKLYL YYLQNGRDMY
VDQELDINRL SDYDVDHIVP QSFLKDDSID NKVLTRSDKN RGKSDNVPSE EVVKKMKNYW
RQLLNAKLIT QRKFDNLTKA ERGGLSELDK AGFIKRQLVE TRQITKHVAQ ILDSRMNTKY
DENDKLIREV KVITLKSKLV SDFRKDFQFY KVREINNYHH AHDAYLNAVV GTALIKKYPK
LESEFVYGDY KVYDVRKMIA KSEQEIGKAT AKYFFYSNIM NFFKTEITLA NGEIRKRPLI
ETNGETGEIV WDKGRDFATV RKVLSMPQVN IVKKTEVQTG GFSKESILPK RNSDKLIARK
KDWDPKKYGG FDSPTVAYSV LVVAKVEKGK SKKLKSVKEL LGITIMERSS FEKNPIDFLE
AKGYKEVKKD LIIKLPKYSL FELENGRKRM LASAGELQKG NELALPSKYV NFLYLASHYE
KLKGSPEDNE QKQLFVEQHK HYLDEIIEQI SEFSKRVILA DANLDKVLSA YNKHRDKPIR
EQAENIIHLF TLTNLGAPAA FKYFDTTIDR KRYTSTKEVL DATLIHQSIT GLYETRIDLS
QLGGDSRADP KKKRKV
iProt106521 (SEQ ID NO: 7825):
MAPKKKRKVD KKYSIGLDIG TNSVGWAVIT DEYKVPSKKF KVLGNTDRHS IKKNLIGALL
FDSGETAEAT RLKRTARRRY TRRKNRICYL QEIFSNEMAK VDDSFFHRLE ESFLVEEDKK
HERHPIFGNI VDEVAYHEKY PTIYHLRKKL VDSTDKADLR LIYLALAHMI KFRGHFLIEG
DLNPDNSDVD KLFIQLVQTY NQLFEENPIN ASGVDAKAIL SARLSKSRRL ENLIAQLPGE
KKNGLFGNLI ALSLGLTPNF KSNFDLAEDA KLQLSKDTYD DDLDNLLAQI GDQYADLFLA
AKNLSDAILL SDILRVNTEI TKAPLSASMI KRYDEHHQDL TLLKALVRQQ LPEKYKEIFF
DQSKNGYAGY IDGGASQEEF YKFIKPILEK MDGTEELLVK LNREDLLRKQ RTFDNGSIPH
QIHLGELHAI LRRQEDFYPF LKDNREKIEK ILTFRIPYYV GPLARGNSRF AWMTRKSEET
ITPWNFEEVV DKGASAQSFI ERMTNFDKNL PNEKVLPKHS LLYEYFTVYN ELTKVKYVTE
GMRKPAFLSG EQKKAIVDLL FKTNRKVTVK QLKEDYFKKI ECFDSVEISG VEDRFNASLG
TYHDLLKIIK DKDFLDNEEN EDILEDIVLT LTLFEDREMI EERLKTYAHL FDDKVMKQLK
RRRYTGWGRL SRKLINGIRD KQSGKTILDF LKSDGFANRN FMQLIHDDSL TFKEDIQKAQ
VSGQGDSLHE HIANLAGSPA IKKGILQTVK VVDELVKVMG RHKPENIVIE MARENQTTQK
GQKNSRERMK RIEEGIKELG SQILKEHPVE NTQLQNEKLY LYYLQNGRDM YVDQELDINR
LSDYDVDHIV PQSFLKDDSI DNKVLTRSDK NRGKSDNVPS EEVVKKMKNY WRQLLNAKLI
TQRKFDNLTK AERGGLSELD KAGFIKRQLV ETRQITKHVA QILDSRMNTK YDENDKLIRE
VKVITLKSKL VSDFRKDFQF YKVREINNYH HAHDAYLNAV VGTALIKKYP KLESEFVYGD
YKVYDVRKMI AKSEQEIGKA TAKYFFYSNI MNFFKTEITL ANGEIRKRPL IETNGETGEI
VWDKGRDFAT VRKVLSMPQV NIVKKTEVQT GGFSKESILP KRNSDKLIAR KKDWDPKKYG
GFDSPTVAYS VLVVAKVEKG KSKKLKSVKE LLGITIMERS SFEKNPIDFL EAKGYKEVKK
DLIIKLPKYS LFELENGRKR MLASAGELQK GNELALPSKY VNFLYLASHY EKLKGSPEDN
EQKQLFVEQH KHYLDEIIEQ ISEFSKRVIL ADANLDKVLS AYNKHRDKPI REQAENIIHL
FTLTNLGAPA AFKYFDTTID RKRYTSTKEV LDATLIHQSI TGLYETRIDL SQLGGDSRAD
HHHHHH
iProt106522 (SEQ ID NO: 7826):
MAHHHHHHGG SDKKYSIGLD IGTNSVGWAV ITDEYKVPSK KFKVLGNTDR HSIKKNLIGA
LLFDSGETAE ATRLKRTARR RYTRRKNRIC YLQEIFSNEM AKVDDSFFHR LEESFLVEED
KKHERHPIFG NIVDEVAYHE KYPTIYHLRK KLVDSTDKAD LRLIYLALAH MIKFRGHFLI
EGDLNPDNSD VDKLFIQLVQ TYNQLFEENP INASGVDAKA ILSARLSKSR RLENLIAQLP
GEKKNGLFGN LIALSLGLTP NFKSNFDLAE DAKLQLSKDT YDDDLDNLLA QIGDQYADLF
LAAKNLSDAI LLSDILRVNT EITKAPLSAS MIKRYDEHHQ DLTLLKALVR QQLPEKYKEI
FFDQSKNGYA GYIDGGASQE EFYKFIKPIL EKMDGTEELL VKLNREDLLR KQRTFDNGSI
PHQIHLGELH AILRRQEDFY PFLKDNREKI EKILTFRIPY YVGPLARGNS RFAWMTRKSE
ETITPWNFEE VVDKGASAQS FIERMTNFDK NLPNEKVLPK HSLLYEYFTV YNELTKVKYV
TEGMRKPAFL SGEQKKAIVD LLFKTNRKVT VKQLKEDYFK KIECFDSVEI SGVEDRFNAS
LGTYHDLLKI IKDKDFLDNE ENEDILEDIV LTLTLFEDRE MIEERLKTYA HLFDDKVMKQ
LKRRRYTGWG RLSRKLINGI RDKQSGKTIL DFLKSDGFAN RNFMQLIHDD SLTFKEDIQK
AQVSGQGDSL HEHIANLAGS PAIKKGILQT VKVVDELVKV MGRHKPENIV IEMARENQTT
QKGQKNSRER MKRIEEGIKE LGSQILKEHP VENTQLQNEK LYLYYLQNGR DMYVDQELDI
NRLSDYDVDH IVPQSFLKDD SIDNKVLTRS DKNRGKSDNV PSEEVVKKMK NYWRQLLNAK
LITQRKFDNL TKAERGGLSE LDKAGFIKRQ LVETRQITKH VAQILDSRMN TKYDENDKLI
REVKVITLKS KLVSDFRKDF QFYKVREINN YHHAHDAYLN AVVGTALIKK YPKLESEFVY
GDYKVYDVRK MIAKSEQEIG KATAKYFFYS NIMNFFKTEI TLANGEIRKR PLIETNGETG
EIVWDKGRDF ATVRKVLSMP QVNIVKKTEV QTGGFSKESI LPKRNSDKLI ARKKDWDPKK
YGGFDSPTVA YSVLVVAKVE KGKSKKLKSV KELLGITIME RSSFEKNPID FLEAKGYKEV
KKDLIIKLPK YSLFELENGR KRMLASAGEL QKGNELALPS KYVNFLYLAS HYEKLKGSPE
DNEQKQLFVE QHKHYLDEII EQISEFSKRV ILADANLDKV LSAYNKHRDK PIREQAENII
HLFTLTNLGA PAAFKYFDTT IDRKRYTSTK EVLDATLIHQ SITGLYETRI DLSQLGGDSR
ADPKKKRKV
iProt106658 (SEQ ID NO: 7827):
MGSSHHHHHH HHENLYFQGS MDKKYSIGLD IGTNSVGWAV ITDEYKVPSK KFKVLGNTDR
HSIKKNLIGA LLFDSGETAE ATRLKRTARR RYTRRKNRIC YLQEIFSNEM AKVDDSFFHR
LEESFLVEED KKHERHPIFG NIVDEVAYHE KYPTIYHLRK KLVDSTDKAD LRLIYLALAH
MIKFRGHFLI EGDLNPDNSD VDKLFIQLVQ TYNQLFEENP INASGVDAKA ILSARLSKSR
RLENLIAQLP GEKKNGLFGN LIALSLGLTP NFKSNFDLAE DAKLQLSKDT YDDDLDNLLA
QIGDQYADLF LAAKNLSDAI LLSDILRVNT EITKAPLSAS MIKRYDEHHQ DLTLLKALVR
QQLPEKYKEI FFDQSKNGYA GYIDGGASQE EFYKFIKPIL EKMDGTEELL VKLNREDLLR
KQRTFDNGSI PHQIHLGELH AILRRQEDFY PFLKDNREKI EKILTFRIPY YVGPLARGNS
RFAWMTRKSE ETITPWNFEE VVDKGASAQS FIERMTNFDK NLPNEKVLPK HSLLYEYFTV
YNELTKVKYV TEGMRKPAFL SGEQKKAIVD LLFKTNRKVT VKQLKEDYFK KIECFDSVEI
SGVEDRFNAS LGTYHDLLKI IKDKDFLDNE ENEDILEDIV LTLTLFEDRE MIEERLKTYA
HLFDDKVMKQ LKRRRYTGWG RLSRKLINGI RDKQSGKTIL DFLKSDGFAN RNFMQLIHDD
SLTFKEDIQK AQVSGQGDSL HEHIANLAGS PAIKKGILQT VKVVDELVKV MGRHKPENIV
IEMARENQTT QKGQKNSRER MKRIEEGIKE LGSQILKEHP VENTQLQNEK LYLYYLQNGR
DMYVDQELDI NRLSDYDVDH IVPQSFLKDD SIDNKVLTRS DKNRGKSDNV PSEEVVKKMK
NYWRQLLNAK LITQRKFDNL TKAERGGLSE LDKAGFIKRQ LVETRQITKH VAQILDSRMN
TKYDENDKLI REVKVITLKS KLVSDFRKDF QFYKVREINN YHHAHDAYLN AVVGTALIKK
YPKLESEFVY GDYKVYDVRK MIAKSEQEIG KATAKYFFYS NIMNFFKTEI TLANGEIRKR
PLIETNGETG EIVWDKGRDF ATVRKVLSMP QVNIVKKTEV QTGGFSKESI LPKRNSDKLI
ARKKDWDPKK YGGFDSPTVA YSVLVVAKVE KGKSKKLKSV KELLGITIME RSSFEKNPID
FLEAKGYKEV KKDLIIKLPK YSLFELENGR KRMLASAGEL QKGNELALPS KYVNFLYLAS
HYEKLKGSPE DNEQKQLFVE QHKHYLDEII EQISEFSKRV ILADANLDKV LSAYNKHRDK
PIREQAENII HLFTLTNLGA PAAFKYFDTT IDRKRYTSTK EVLDATLIHQ SITGLYETRI
DLSQLGGDGG GSPKKKRKV
iProt106745 (SEQ ID NO: 7828):
MAPKKKRKVD KKYSIGLDIG TNSVGWAVIT DEYKVPSKKF KVLGNTDRHS IKKNLIGALL
FDSGETAEAT RLKRTARRRY TRRKNRICYL QEIFSNEMAK VDDSFFHRLE ESFLVEEDKK
HERHPIFGNI VDEVAYHEKY PTIYHLRKKL VDSTDKADLR LIYLALAHMI KFRGHFLIEG
DLNPDNSDVD KLFIQLVQTY NQLFEENPIN ASGVDAKAIL SARLSKSRRL ENLIAQLPGE
KKNGLFGNLI ALSLGLTPNF KSNFDLAEDA KLQLSKDTYD DDLDNLLAQI GDQYADLFLA
AKNLSDAILL SDILRVNTEI TKAPLSASMI KRYDEHHQDL TLLKALVRQQ LPEKYKEIFF
DQSKNGYAGY IDGGASQEEF YKFIKPILEK MDGTEELLVK LNREDLLRKQ RTFDNGSIPH
QIHLGELHAI LRRQEDFYPF LKDNREKIEK ILTFRIPYYV GPLARGNSRF AWMTRKSEET
ITPWNFEEVV DKGASAQSFI ERMTNFDKNL PNEKVLPKHS LLYEYFTVYN ELTKVKYVTE
GMRKPAFLSG EQKKAIVDLL FKTNRKVTVK QLKEDYFKKI ECFDSVEISG VEDRFNASLG
TYHDLLKIIK DKDFLDNEEN EDILEDIVLT LTLFEDREMI EERLKTYAHL FDDKVMKQLK
RRRYTGWGRL SRKLINGIRD KQSGKTILDF LKSDGFANRN FMQLIHDDSL TFKEDIQKAQ
VSGQGDSLHE HIANLAGSPA IKKGILQTVK VVDELVKVMG RHKPENIVIE MARENQTTQK
GQKNSRERMK RIEEGIKELG SQILKEHPVE NTQLQNEKLY LYYLQNGRDM YVDQELDINR
LSDYDVDHIV PQSFLKDDSI DNAVLTRSDK NRGKSDNVPS EEVVKKMKNY WRQLLNAKLI
TQRKFDNLTK AERGGLSELD KAGFIKRQLV ETRQITKHVA QILDSRMNTK YDENDKLIRE
VKVITLKSKL VSDFRKDFQF YKVREINNYH HAHDAYLNAV VGTALIKKYP KLESEFVYGD
YKVYDVRKMI AKSEQEIGKA TAKYFFYSNI MNFFKTEITL ANGEIRKRPL IETNGETGEI
VWDKGRDFAT VRKVLSMPQV NIVKKTEVQT GGFSKESILP KRNSDKLIAR KKDWDPKKYG
GFDSPTVAYS VLVVAKVEKG KSKKLKSVKE LLGITIMERS SFEKNPIDFL EAKGYKEVKK
DLIIKLPKYS LFELENGRKR MLASAGELQK GNELALPSKY VNFLYLASHY EKLKGSPEDN
EQKQLFVEQH KHYLDEIIEQ ISEFSKRVIL ADANLDKVLS AYNKHRDKPI REQAENIIHL
FTLTNLGAPA AFKYFDTTID RKRYTSTKEV LDATLIHQSI TGLYETRIDL SQLGGDSRAD
PKKKRKVHHH HHH
iProt106746 (SEQ ID NO: 7829):
MAPKKKRKVD KKYSIGLDIG TNSVGWAVIT DEYKVPSKKF KVLGNTDRHS IKKNLIGALL
FDSGETAEAT RLKRTARRRY TRRKNRICYL QEIFSNEMAK VDDSFFHRLE ESFLVEEDKK
HERHPIFGNI VDEVAYHEKY PTIYHLRKKL VDSTDKADLR LIYLALAHMI KFRGHFLIEG
DLNPDNSDVD KLFIQLVQTY NQLFEENPIN ASGVDAKAIL SARLSKSRRL ENLIAQLPGE
KKNGLFGNLI ALSLGLTPNF KSNFDLAEDA KLQLSKDTYD DDLDNLLAQI GDQYADLFLA
AKNLSDAILL SDILRVNTEI TKAPLSASMI KRYDEHHQDL TLLKALVRQQ LPEKYKEIFF
DQSKNGYAGY IDGGASQEEF YKFIKPILEK MDGTEELLVK LNREDLLRKQ RTFDNGSIPH
QIHLGELHAI LRRQEDFYPF LKDNREKIEK ILTFRIPYYV GPLARGNSRF AWMTRKSEET
ITPWNFEEVV DKGASAQSFI ERMTNFDKNL PNEKVLPKHS LLYEYFTVYN ELTKVKYVTE
GMRKPAFLSG EQKKAIVDLL FKTNRKVTVK QLKEDYFKKI ECFDSVEISG VEDRFNASLG
TYHDLLKIIK DKDFLDNEEN EDILEDIVLT LTLFEDREMI EERLKTYAHL FDDKVMKQLK
RRRYTGWGRL SRKLINGIRD KQSGKTILDF LKSDGFANRN FMQLIHDDSL TFKEDIQKAQ
VSGQGDSLHE HIANLAGSPA IKKGILQTVK VVDELVKVMG RHKPENIVIE MARENQTTQK
GQKNSRERMK RIEEGIKELG SQILKEHPVE NTQLQNEALY LYYLQNGRDM YVDQELDINR
LSDYDVDHIV PQSFLKDDSI DNKVLTRSDK NRGKSDNVPS EEVVKKMKNY WRQLLNAKLI
TQRKFDNLTK AERGGLSELD KAGFIKRQLV ETRQITKHVA QILDSRMNTK YDENDKLIRE
VKVITLKSKL VSDFRKDFQF YKVREINNYH HAHDAYLNAV VGTALIKKYP ALESEFVYGD
YKVYDVRKMI AKSEQEIGKA TAKYFFYSNI MNFFKTEITL ANGEIRKAPL IETNGETGEI
VWDKGRDFAT VRKVLSMPQV NIVKKTEVQT GGFSKESILP KRNSDKLIAR KKDWDPKKYG
GFDSPTVAYS VLVVAKVEKG KSKKLKSVKE LLGITIMERS SFEKNPIDFL EAKGYKEVKK
DLIIKLPKYS LFELENGRKR MLASAGELQK GNELALPSKY VNFLYLASHY EKLKGSPEDN
EQKQLFVEQH KHYLDEIIEQ ISEFSKRVIL ADANLDKVLS AYNKHRDKPI REQAENIIHL
FTLTNLGAPA AFKYFDTTID RKRYTSTKEV LDATLIHQSI TGLYETRIDL SQLGGDSRAD
PKKKRKVHHH HHH
iProt106747 (SEQ ID NO: 7830):
MAPKKKRKVD KKYSIGLDIG TNSVGWAVIT DEYKVPSKKF KVLGNTDRHS IKKNLIGALL
FDSGETAEAT RLKRTARRRY TRRKNRICYL QEIFSNEMAK VDDSFFHRLE ESFLVEEDKK
HERHPIFGNI VDEVAYHEKY PTIYHLRKKL VDSTDKADLR LIYLALAHMI KFRGHFLIEG
DLNPDNSDVD KLFIQLVQTY NQLFEENPIN ASGVDAKAIL SARLSKSRRL ENLIAQLPGE
KKNGLFGNLI ALSLGLTPNF KSNFDLAEDA KLQLSKDTYD DDLDNLLAQI GDQYADLFLA
AKNLSDAILL SDILRVNTEI TKAPLSASMI KRYDEHHQDL TLLKALVRQQ LPEKYKEIFF
DQSKNGYAGY IDGGASQEEF YKFIKPILEK MDGTEELLVK LNREDLLRKQ RTFDNGSIPH
QIHLGELHAI LRRQEDFYPF LKDNREKIEK ILTFRIPYYV GPLARGNSRF AWMTRKSEET
ITPWNFEEVV DKGASAQSFI ERMTNFDKNL PNEKVLPKHS LLYEYFTVYN ELTKVKYVTE
GMRKPAFLSG EQKKAIVDLL FKTNRKVTVK QLKEDYFKKI ECFDSVEISG VEDRFNASLG
TYHDLLKIIK DKDFLDNEEN EDILEDIVLT LTLFEDREMI EERLKTYAHL FDDKVMKQLK
RRRYTGWGRL SRKLINGIRD KQSGKTILDF LKSDGFANRN FMQLIHDDSL TFKEDIQKAQ
VSGQGDSLHE HIANLAGSPA IKKGILQTVK VVDELVKVMG RHKPENIVIE MARENQTTQK
GQKNSRERMK RIEEGIKELG SQILKEHPVE NTQLQNEKLY LYYLQNGRDM YVDQELDINR
LSDYDVDHIV PQSFLADDSI DNKVLTRSDK NRGKSDNVPS EEVVKKMKNY WRQLLNAKLI
TQRKFDNLTK AERGGLSELD KAGFIKRQLV ETRQITKHVA QILDSRMNTK YDENDKLIRE
VKVITLKSKL VSDFRKDFQF YKVREINNYH HAHDAYLNAV VGTALIKKYP ALESEFVYGD
YKVYDVRKMI AKSEQEIGKA TAKYFFYSNI MNFFKTEITL ANGEIRKAPL IETNGETGEI
VWDKGRDFAT VRKVLSMPQV NIVKKTEVQT GGFSKESILP KRNSDKLIAR KKDWDPKKYG
GFDSPTVAYS VLVVAKVEKG KSKKLKSVKE LLGITIMERS SFEKNPIDFL EAKGYKEVKK
DLIIKLPKYS LFELENGRKR MLASAGELQK GNELALPSKY VNFLYLASHY EKLKGSPEDN
EQKQLFVEQH KHYLDEIIEQ ISEFSKRVIL ADANLDKVLS AYNKHRDKPI REQAENIIHL
FTLTNLGAPA AFKYFDTTID RKRYTSTKEV LDATLIHQSI TGLYETRIDL SQLGGDSRAD
PKKKRKVHHH HHH
iProt106884 (SEQ ID NO: 7831):
MAPKKKRKVD KKYSIGLDIG TNSVGWAVIT DEYKVPSKKF KVLGNTDRHS IKKNLIGALL
FDSGETAEAT RLKRTARRRY TRRKNRICYL QEIFSNEMAK VDDSFFHRLE ESFLVEEDKK
HERHPIFGNI VDEVAYHEKY PTIYHLRKKL VDSTDKADLR LIYLALAHMI KFRGHFLIEG
DLNPDNSDVD KLFIQLVQTY NQLFEENPIN ASGVDAKAIL SARLSKSRRL ENLIAQLPGE
KKNGLFGNLI ALSLGLTPNF KSNFDLAEDA KLQLSKDTYD DDLDNLLAQI GDQYADLFLA
AKNLSDAILL SDILRVNTEI TKAPLSASMI KRYDEHHQDL TLLKALVRQQ LPEKYKEIFF
DQSKNGYAGY IDGGASQEEF YKFIKPILEK MDGTEELLVK LNREDLLRKQ RTFDNGSIPH
QIHLGELHAI LRRQEDFYPF LKDNREKIEK ILTFRIPYYV GPLARGNSRF AWMTRKSEET
ITPWNFEEVV DKGASAQSFI ERMTAFDKNL PNEKVLPKHS LLYEYFTVYN ELTKVKYVTE
GMRKPAFLSG EQKKAIVDLL FKTNRKVTVK QLKEDYFKKI ECFDSVEISG VEDRFNASLG
TYHDLLKIIK DKDFLDNEEN EDILEDIVLT LTLFEDREMI EERLKTYAHL FDDKVMKQLK
RRRYTGWGAL SRKLINGIRD KQSGKTILDF LKSDGFANRN FMALIHDDSL TFKEDIQKAQ
VSGQGDSLHE HIANLAGSPA IKKGILQTVK VVDELVKVMG RHKPENIVIE MARENQTTQK
GQKNSRERMK RIEEGIKELG SQILKEHPVE NTQLQNEKLY LYYLQNGRDM YVDQELDINR
LSDYDVDHIV PQSFLKDDSI DNKVLTRSDK NRGKSDNVPS EEVVKKMKNY WRQLLNAKLI
TQRKFDNLTK AERGGLSELD KAGFIKRQLV ETRAITKHVA QILDSRMNTK YDENDKLIRE
VKVITLKSKL VSDFRKDFQF YKVREINNYH HAHDAYLNAV VGTALIKKYP KLESEFVYGD
YKVYDVRKMI AKSEQEIGKA TAKYFFYSNI MNFFKTEITL ANGEIRKRPL IETNGETGEI
VWDKGRDFAT VRKVLSMPQV NIVKKTEVQT GGFSKESILP KRNSDKLIAR KKDWDPKKYG
GFDSPTVAYS VLVVAKVEKG KSKKLKSVKE LLGITIMERS SFEKNPIDFL EAKGYKEVKK
DLIIKLPKYS LFELENGRKR MLASAGELQK GNELALPSKY VNFLYLASHY EKLKGSPEDN
EQKQLFVEQH KHYLDEIIEQ ISEFSKRVIL ADANLDKVLS AYNKHRDKPI REQAENIIHL
FTLTNLGAPA AFKYFDTTID RKRYTSTKEV LDATLIHQSI TGLYETRIDL SQLGGDSRAD
PKKKRKVHHH HHH

### Nucleic Acids Encoding Cas9 Molecules

[0754] Nucleic acids encoding the Cas9 molecules, e.g., an active Cas9 molecule or an inactive Cas9 molecule are provided herein.

[0755] Exemplary nucleic acids encoding Cas9 molecules are described in Cong et al, SCIENCE 2013, 399(6121):819-823; Wang et al, CELL 2013, 153(4):910-918; Mali et al., SCIENCE 2013, 399(6121):823-826; Jinek et al, SCIENCE 2012, 337(6096):816-821.

[0756] In an embodiment, a nucleic acid encoding a Cas9 molecule can be a synthetic nucleic acid sequence. For example, the synthetic nucleic acid molecule can be chemically modified, e.g., as described in Section XIII. In an embodiment, the Cas9 mRNA has one or more of, e.g., all of the following properties: it is capped, polyadenylated, substituted with 5-methylcytidine and/or pseudouridine.

[0757] In addition or alternatively, the synthetic nucleic acid sequence can be codon optimized, e.g., at least one non-common codon or less-common codon has been replaced by a common codon. For example, the synthetic nucleic acid can direct the synthesis of an optimized messenger mRNA, e.g., optimized for expression in a mammalian expression system, e.g., described herein.

[0758] Provided below is an exemplary codon optimized nucleic acid sequence encoding a Cas9 molecule of S. pyogenes.

| (SEQ ID NO: 6628) | |
|---|---|
| atggataaaa agtacagcat cgggctggac atcggtacaa actcagtggg gtgggccgtg | 60 |
| attacggacg agtacaaggt accctccaaa aaatttaaag tgctgggtaa cacggacaga | 120 |
| cactctataa agaaaaatct tattggagcc ttgctgttcg actcaggcga gacagccgaa | 180 |
| gccacaaggt tgaagcggac cgccaggagg cggtatacca ggagaaagaa ccgcatatgc | 240 |
| tacctgcaag aaatcttcag taacgagatg gcaaaggttg acgatagctt tttccatcgc | 300 |
| ctggaagaat cctttcttgt tgaggaagac aagaagcacg aacggcaccc catctttggc | 360 |
| aatattgtcg acgaagtggc atatcacgaa aagtacccga ctatctacca cctcaggaag | 420 |
| aagctggtgg actctaccga taaggcggac ctcagactta tttatttggc actcgcccac | 480 |
| atgattaaat ttagaggaca tttcttgatc gagggcgacc tgaacccgga caacagtgac | 540 |
| gtcgataagc tgttcatcca acttgtgcag acctacaatc aactgttcga agaaaaccct | 600 |
| ataaatgctt caggagtcga cgctaaagca atcctgtccg cgcgcctctc aaaatctaga | 660 |
| agacttgaga atctgattgc tcagttgccc ggggaaaaga aaaatggatt gtttggcaac | 720 |
| ctgatcgccc tcagtctcgg actgacccca aatttcaaaa gtaacttcga cctggccgaa | 780 |
| gacgctaagc tccagctgtc caaggacaca tacgatgacg acctcgacaa tctgctggcc | 840 |
| cagattgggg atcagtacgc cgatctcttt ttggcagcaa agaacctgtc cgacgccatc | 900 |
| ctgttgagcg atatcttgag agtgaacacc gaaattacta aagcacccct tagcgcatct | 960 |
| atgatcaagc ggtacgacga gcatcatcag gatctgaccc tgctgaaggc tcttgtgagg | 1020 |
| caacagctcc ccgaaaaata caaggaaatc ttctttgacc agagcaaaaa cggctacgct | 1080 |
| ggctatatag atggtggggc cagtcaggag gaattctata aattcatcaa gcccattctc | 1140 |
| gagaaaatgg acggcacaga ggagttgctg gtcaaactta acagggagga cctgctgcgg | 1200 |
| aagcagcgga cctttgacaa cgggtctatc ccccaccaga ttcatctggg cgaactgcac | 1260 |
| gcaatcctga ggaggcagga ggatttttat ccttttctta aagataaccg cgagaaaata | 1320 |
| gaaaagattc ttacattcag gatcccgtac tacgtgggac ctctcgcccg gggcaattca | 1380 |
| cggtttgcct ggatgacaag gaagtcagag gagactatta caccttggaa cttcgaagaa | 1440 |
| gtggtggaca agggtgcatc tgcccagtct ttcatcgagc ggatgacaaa ttttgacaag | 1500 |
| aacctcccta atgagaaggt gctgcccaaa cattctctgc tctacgagta ctttaccgtc | 1560 |
| tacaatgaac tgactaaagt caagtacgtc accgagggaa tgaggaagcc ggcattcctt | 1620 |
| agtggagaac agaagaaggc gattgtagac ctgttgttca agaccaacag gaaggtgact | 1680 |
| gtgaagcaac ttaaagaaga ctactttaag aagatcgaat gttttgacag tgtggaaatt | 1740 |
| tcaggggttg aagaccgctt caatgcgtca ttggggactt accatgatct tctcaagatc | 1800 |
| ataaaggaca aagacttcct ggacaacgaa gaaaatgagg atattctcga agacatcgtc | 1860 |
| ctcaccctga ccctgttcga agacagggaa atgatagaag agcgcttgaa aacctatgcc | 1920 |
| cacctcttcg acgataaagt tatgaagcag ctgaagcgca ggagatacac aggatgggga | 1980 |
| agattgtcaa ggaagctgat caatggaatt agggataaac agagtggcaa gaccatactg | 2040 |
| gatttcctca aatctgatgg cttcgccaat aggaacttca tgcaactgat tcacgatgac | 2100 |
| tctcttacct tcaaggagga cattcaaaag gctcaggtga gcgggcaggg agactccctt | 2160 |
| catgaacaca tcgcgaattt ggcaggttcc cccgctatta aaaagggcat ccttcaaact | 2220 |
| gtcaaggtgg tggatgaatt ggtcaaggta atgggcagac ataagccaga aaatattgtg | 2280 |
| atcgagatgg cccgcgaaaa ccagaccaca cagaagggcc agaaaaatag tagagagcgg | 2340 |
| atgaagagga tcgaggaggg catcaaagag ctgggatctc agattctcaa agaacacccc | 2400 |
| gtagaaaaca cacagctgca gaacgaaaaa ttgtacttgt actatctgca gaacggcaga | 2460 |
| gacatgtacg tcgaccaaga acttgatatt aatagactgt ccgactatga cgtagaccat | 2520 |
| atcgtgcccc agtccttcct gaaggacgac tccattgata acaaagtctt gacaagaagc | 2580 |
| gacaagaaca ggggtaaaag tgataatgtg cctagcgagg aggtggtgaa aaaaatgaag | 2640 |
| aactactggc gacagctgct taatgcaaag ctcattacac aacggaagtt cgataatctg | 2700 |
| acgaaagcag agagaggtgg cttgtctgag ttggacaagg cagggtttat taagcggcag | 2760 |
| ctggtggaaa ctaggcagat cacaaagcac gtggcgcaga ttttggacag ccggatgaac | 2820 |
| acaaaatacg acgaaaatga taaactgata cgagaggtca aagttatcac gctgaaaagc | 2880 |
| aagctggtgt ccgattttcg gaaagacttc cagttctaca aagttcgcga gattaataac | 2940 |
| taccatcatg ctcacgatgc gtacctgaac gctgttgtcg ggaccgcctt gataaagaag | 3000 |
| tacccaaagc tggaatccga gttcgtatac ggggattaca aagtgtacga tgtgaggaaa | 3060 |
| atgatagcca agtccgagca ggagattgga aaggccacag ctaagtactt cttttattct | 3120 |
| aacatcatga atttttttaa gacggaaatt accctggcca acggagagat cagaaagcgg | 3180 |
| ccccttatag agacaaatgg tgaaacaggt gaaatcgtct gggataaggg cagggatttc | 3240 |
| gctactgtga ggaaggtgct gagtatgcca caggtaaata tcgtgaaaaa aaccgaagta | 3300 |
| cagaccggag gattttccaa ggaaagcatt ttgcctaaaa gaaactcaga caagctcatc | 3360 |
| gcccgcaaga aagattggga ccctaagaaa tacgggggat ttgactcacc caccgtagcc | 3420 |
| tattctgtgc tggtggtagc taaggtggaa aaaggaaagt ctaagaagct gaagtccgtg | 3480 |
| aaggaactct tgggaatcac tatcatggaa agatcatcct ttgaaaagaa ccctatcgat | 3540 |
| ttcctggagg ctaagggtta caaggaggtc aagaaagacc tcatcattaa actgccaaaa | 3600 |
| tactctctct tcgagctgga aaatggcagg aagagaatgt tggccagcgc cggagagctg | 3660 |
| caaaagggaa acgagcttgc tctgccctcc aaatatgtta attttctcta tctcgcttcc | 3720 |
| cactatgaaa agctgaaagg gtctcccgaa gataacgagc agaagcagct gttcgtcgaa | 3780 |
| cagcacaagc actatctgga tgaaataatc gaacaaataa gcgagttcag caaaagggtt | 3840 |
| atcctggcgg atgctaattt ggacaaagta ctgtctgctt ataacaagca ccgggataag | 3900 |
| cctattaggg aacaagccga gaatataatt cacctcttta cactcacgaa tctcggagcc | 3960 |
| cccgccgcct tcaaatactt tgatacgact atcgaccgga aacggtatac cagtaccaaa | 4020 |
| gaggtcctcg atgccaccct catccaccag tcaattactg gcctgtacga aacacggatc | 4080 |
| gacctctctc aactgggcgg cgactag | 4107 |

[0759] If the above Cas9 sequences are fused with a peptide or polypeptide at the C-terminus (e.g., an inactive Cas9 fused with a transcription repressor at the C-terminus), it is understood that the stop codon will be removed.

### V. Chimeric Antigen Receptors

[0760] The invention provides for gRNA molecules and CRISPR systems for use in connection with adoptive immunotherapy methods and reagents such as chimeric antigen receptor (CAR) immune effector cells, e.g., T cells, or chimeric TCR-transduced immune effector cells, e.g., T cells. The gRNA molecules and CRISPR systems of the invention can be used to create adoptive immunotherapy cells and compositions with improved properties, such as efficacy and safety. This section describes CAR technology generally that is useful in conjunction with the gRNA molecules and CRISPR systems of the invention, and describes improved CAR reagents, e.g., cells and compositions, and methods.

[0761] In general, aspects of the invention pertain to or include an isolated nucleic acid molecule encoding a chimeric antigen receptor (CAR), wherein the CAR comprises an antigen binding domain (e.g., antibody or antibody fragment, TCR or TCR fragment) that binds to a tumor antigen as described herein, a transmembrane domain (e.g., a transmembrane domain described herein), and an intracellular signaling domain (e.g., an intracellular signaling domain described herein) (e.g., an intracellular signaling domain comprising a costimulatory domain (e.g., a costimulatory domain described herein) and/or a primary signaling domain (e.g., a primary signaling domain described herein). In other aspects, the invention includes: host cells containing the above nucleic acids and isolated proteins encoded by such nucleic acid molecules. CAR nucleic acid constructs, encoded proteins, containing vectors, host cells, pharmaceutical compositions, and methods of administration and treatment related to the present invention are disclosed in detail in International Patent Application Publication No. WO2015142675, which is incorporated by reference in its entirety.

[0762] In one aspect, the invention pertains to an isolated nucleic acid molecule encoding a chimeric antigen receptor (CAR), wherein the CAR comprises an antigen binding domain (e.g., antibody or antibody fragment, TCR or TCR fragment) that binds to a tumor-supporting antigen (e.g., a tumor-supporting antigen as described herein), a transmembrane domain (e.g., a transmembrane domain described herein), and an intracellular signaling domain (e.g., an intracellular signaling domain described herein) (e.g., an intracellular signaling domain comprising a costimulatory domain (e.g., a costimulatory domain described herein) and/or a primary signaling domain (e.g., a primary signaling domain described herein). In some embodiments, the tumor-supporting antigen is an antigen present on a stromal cell or a myeloid-derived suppressor cell (MDSC). In other aspects, the invention features polypeptides encoded by such nucleic acids and host cells containing such nucleic acids and/or polypeptides.

[0763] Alternatively, aspects of the invention pertain to isolated nucleic acid encoding a chimeric T cell receptor (TCR) comprising a TCR alpha and/or TCR beta variable domain with specificity for a cancer antigen described herein. See for example, Dembic et al., Nature, 320, 232-238 (1986), Schumacher, Nat. Rev. Immunol., 2, 512-519 (2002), Kershaw et al., Nat. Rev. Immunol., 5, 928-940 (2005), Xue et al., Clin. Exp. Immunol., 139, 167-172 (2005), Rossig et al., Mol. Ther., 10, 5-18 (2004), and Murphy et al., Immunity, 22, 403-414 (2005); (Morgan et al. J. Immunol., 171, 3287-3295 (2003), Hughes et al., Hum. Gene Ther., 16, 1-16 (2005), Zhao et al., J. Immunol., 174, 4415-4423 (2005), Roszkowski et al., Cancer Res., 65, 1570-1576 (2005), and Engels et al., Hum. Gene Ther., 16, 799-810 (2005); US2009/03046557, the contents of which are hereby incorporated by reference in their entirety. Such chimeric TCRs may recognize, for example, cancer antigens such as MART-1, gp-100, p53, and NY-ESO-1, MAGE A3/A6, MAGEA3, SSX2, HPV-16 E6 or HPV-16 E7. In other aspects, the invention features polypeptides encoded by such nucleic acids and host cells containing such nucleic acids and/or polypeptides.

### Targets

[0764] The present invention provides cells, e.g., immune effector cells (e.g., T cells, NK cells), that comprise or at any time comprised a gRNA molecule or CRISPR system as described herein, that are further engineered to contain one or more CARs that direct the immune effector cells to undesired cells (e.g., cancer cells). This is achieved through an antigen binding domain on the CAR that is specific for a cancer associated antigen. There are two classes of cancer associated antigens (tumor antigens) that can be targeted by the CARs of the instant invention: (1) cancer associated antigens that are expressed on the surface of cancer cells; and (2) cancer associated antigens that itself is intracelluar, however, a fragment of such antigen (peptide) is presented on the surface of the cancer cells by MHC (major histocompatibility complex).

[0765] In some embodiments, the tumor antigen is chosen from one or more of: CD19; CD123; CD22; CD30; CD171; CS-1 (also referred to as CD2 subset 1, CRACC, SLAMF7, CD319, and 19A24); C-type lectin-like molecule-1 (CLL-1 or CLECL1); CD33; epidermal growth factor receptor variant III (EGFRvIII); ganglioside G2 (GD2); ganglioside GD3 (aNeu5Ac(2-8)aNeu5Ac(2-3)bDGalp(1-4)bDGlcp(1-1)Cer); TNF receptor family member B cell maturation (BCMA); Tn antigen ((Tn Ag) or (GalNAcα-Ser/Thr)); prostate-specific membrane antigen (PSMA); Receptor tyrosine kinase-like orphan receptor 1 (ROR1); Fms-Like Tyrosine Kinase 3 (FLT3); Tumor-associated glycoprotein 72 (TAG72); CD38; CD44v6; Carcinoembryonic antigen (CEA); Epithelial cell adhesion molecule (EPCAM); B7H3 (CD276); KIT (CD117); Interleukin-13 receptor subunit alpha-2 (IL-13Ra2 or CD213A2); Mesothelin; Interleukin 11 receptor alpha (IL-11Ra); prostate stem cell antigen (PSCA); Protease Serine 21 (Testisin or PRSS21); vascular endothelial growth factor receptor 2 (VEGFR2); Lewis(Y) antigen; CD24; Platelet-derived growth factor receptor beta (PDGFR-beta); Stage-specific embryonic antigen-4 (SSEA-4); CD20; Folate receptor alpha; Receptor tyrosine-protein kinase ERBB2 (Her2/neu); Mucin 1, cell surface associated (MUC1); epidermal growth factor receptor (EGFR); neural cell adhesion molecule (NCAM); Prostase; prostatic acid phosphatase (PAP); elongation factor 2 mutated (ELF2M); Ephrin B2; fibroblast activation protein alpha (FAP); insulin-like growth factor 1 receptor (IGF-I receptor), carbonic anhydrase IX (CAIX); Proteasome (Prosome, Macropain) Subunit, Beta Type, 9 (LMP2); glycoprotein 100 (gp100); oncogene fusion protein consisting of breakpoint cluster region (BCR) and Abelson murine leukemia viral oncogene homolog 1 (Abl) (bcr-abl); tyrosinase; ephrin type-A receptor 2 (EphA2); Fucosyl GM1; sialyl Lewis adhesion molecule (sLe); ganglioside GM3 (aNeu5Ac(2-3)bDGalp(1-4)bDGlcp(1-1)Cer); transglutaminase 5 (TGS5); high molecular weight-melanoma-associated antigen (HMWMAA); o-acetyl-GD2 ganglioside (OAcGD2); Folate receptor beta; tumor endothelial marker 1 (TEM1/CD248); tumor endothelial marker 7-related (TEM7R); claudin 6 (CLDN6); thyroid stimulating hormone receptor (TSHR); G protein-coupled receptor class C group 5, member D (GPRC5D); chromosome X open reading frame 61 (CXORF61); CD97; CD179a; anaplastic lymphoma kinase (ALK); Polysialic acid; placenta-specific 1 (PLAC1); hexasaccharide portion of globoH glycoceramide (GloboH); mammary gland differentiation antigen (NY-BR-1); uroplakin 2 (UPK2); Hepatitis A virus cellular receptor 1 (HAVCR1); adrenoceptor beta 3 (ADRB3); pannexin 3 (PANX3); G protein-coupled receptor 20 (GPR20); lymphocyte antigen 6 complex, locus K 9 (LY6K); Olfactory receptor 51 E2 (OR51 E2); TCR Gamma Alternate Reading Frame Protein (TARP); Wilms tumor protein (WT1); Cancer/testis antigen 1 (NY-ESO-1); Cancer/testis antigen 2 (LAGE-1a); Melanoma-associated antigen 1 (MAGE-A1); ETS translocation-variant gene 6, located on chromosome 12p (ETV6-AML); sperm protein 17 (SPA17); X Antigen Family, Member 1A (XAGE1); angiopoietin-binding cell surface receptor 2 (Tie 2); melanoma cancer testis antigen-1 (MAD-CT-1); melanoma cancer testis antigen-2 (MAD-CT-2); Fos-related antigen 1; tumor protein p53 (p53); p53 mutant; prostein; surviving; telomerase; prostate carcinoma tumor antigen-1 (PCTA-1 or Galectin 8), melanoma antigen recognized by T cells 1 (MelanA or MART1); Rat sarcoma (Ras) mutant; human Telomerase reverse transcriptase (hTERT); sarcoma translocation breakpoints; melanoma inhibitor of apoptosis (ML-IAP); ERG (transmembrane protease, serine 2 (TMPRSS2) ETS fusion gene); N-Acetyl glucosaminyl-transferase V (NA17); paired box protein Pax-3 (PAX3); Androgen receptor; Cyclin B1; v-myc avian myelocytomatosis viral oncogene neuroblastoma derived homolog (MYCN); Ras Homolog Family Member C (RhoC); Tyrosinase-related protein 2 (TRP-2); Cytochrome P450 1B1 (CYP1B1); CCCTC-Binding Factor (Zinc Finger Protein)-Like (BORIS or Brother of the Regulator of Imprinted Sites), Squamous Cell Carcinoma Antigen Recognized By T Cells 3 (SART3); Paired box protein Pax-5 (PAX5); proacrosin binding protein sp32 (OY-TES1); lymphocyte-specific protein tyrosine kinase (LCK); A kinase anchor protein 4 (AKAP-4); synovial sarcoma, X breakpoint 2 (SSX2); Receptor for Advanced Glycation Endproducts (RAGE-1); renal ubiquitous 1 (RU1); renal ubiquitous 2 (RU2); legumain; human papilloma virus E6 (HPV E6); human papilloma virus E7 (HPV E7); intestinal carboxyl esterase; heat shock protein 70-2 mutated (mut hsp70-2); CD79a; CD79b; CD72; Leukocyte-associated immunoglobulin-like receptor 1 (LAIR1); Fc fragment of IgA receptor (FCAR or CD89); Leukocyte immunoglobulin-like receptor subfamily A member 2 (LILRA2); CD300 molecule-like family member f (CD300LF); C-type lectin domain family 12 member A (CLEC12A); bone marrow stromal cell antigen 2 (BST2); EGF-like module-containing mucin-like hormone receptor-like 2 (EMR2); lymphocyte antigen 75 (LY75); Glypican-3 (GPC3); Fc receptor-like 5 (FCRL5); and immunoglobulin lambda-like polypeptide 1 (IGLL1).

[0766] A CAR described herein can comprise an antigen binding domain (e.g., antibody or antibody fragment, TCR or TCR fragment) that binds to a tumor-supporting antigen (e.g., a tumor-supporting antigen as described herein). In some embodiments, the tumor-supporting antigen is an antigen present on a stromal cell or a myeloid-derived suppressor cell (MDSC). Stromal cells can secrete growth factors to promote cell division in the microenvironment. MDSC cells can inhibit T cell proliferation and activation. Without wishing to be bound by theory, in some embodiments, the CAR-expressing cells destroy the tumor-supporting cells, thereby indirectly inhibiting tumor growth or survival.

[0767] In embodiments, the stromal cell antigen is chosen from one or more of: bone marrow stromal cell antigen 2 (BST2), fibroblast activation protein (FAP) and tenascin. In an embodiment, the FAP-specific antibody is, competes for binding with, or has the same CDRs as, sibrotuzumab. In embodiments, the MDSC antigen is chosen from one or more of: CD33, CD11b, C14, CD15, and CD66b. Accordingly, in some embodiments, the tumor-supporting antigen is chosen from one or more of: bone marrow stromal cell antigen 2 (BST2), fibroblast activation protein (FAP) or tenascin, CD33, CD11b, C14, CD15, and CD66b.

### Antigen Binding Domain Structures

[0768] In some embodiments, the antigen binding domain of the encoded CAR molecule comprises an antibody, an antibody fragment, an scFv, a Fv, a Fab, a (Fab′)2, a single domain antibody (SDAB), a VH or VL domain, a camelid VHH domain or a bi-functional (e.g. bi-specific) hybrid antibody (e.g., Lanzavecchia et al., Eur. J. Immunol. 17, 105 (1987)).

[0769] In some instances, scFvs can be prepared according to method known in the art (see, for example, Bird et al., (1988) Science 242:423-426 and Huston et al., (1988) Proc. Natl. Acad. Sci. USA 85:5879-5883). ScFv molecules can be produced by linking VH and VL regions together using flexible polypeptide linkers. The scFv molecules comprise a linker (e.g., a Ser-Gly linker) with an optimized length and/or amino acid composition. The linker length can greatly affect how the variable regions of a scFv fold and interact. In fact, if a short polypeptide linker is employed (e.g., between 5-10 amino acids) intrachain folding is prevented. Interchain folding is also required to bring the two variable regions together to form a functional epitope binding site. For examples of linker orientation and size see, e.g., Hollinger et al. 1993 Proc Natl Acad. Sci. U.S.A. 90:6444-6448, U.S. Patent Application Publication Nos. 2005/0100543, 2005/0175606, 2007/0014794, and PCT publication Nos. WO2006/020258 and WO2007/024715, is incorporated herein by reference.

[0770] An scFv can comprise a linker of at least 1, 2, 3, 4, 5, 6, 7, 8, 9, 10, 11, 12, 13, 14, 15, 16, 17, 18, 19, 20, 25, 30, 35, 40, 45, 50, or more amino acid residues between its VL and VH regions. The linker sequence may comprise any naturally occurring amino acid. In some embodiments, the linker sequence comprises amino acids glycine and serine. In another embodiment, the linker sequence comprises sets of glycine and serine repeats such as (Gly₄Ser)n, where n is a positive integer equal to or greater than 1 (SEQ ID NO:6629). In one embodiment, the linker can be (Gly₄Ser)₄ (SEQ ID NO:6593) or (Gly₄Ser)₃ (SEQ ID NO:6594). Variation in the linker length may retain or enhance activity, giving rise to superior efficacy in activity studies.

[0771] In another aspect, the antigen binding domain is a T cell receptor (“TCR”), or a fragment thereof, for example, a single chain TCR (scTCR). Methods to make such TCRs are known in the art. See, e.g., Willemsen R A et al, Gene Therapy 7: 1369-1377 (2000); Zhang T et al, Cancer Gene Ther 11: 487-496 (2004); Aggen et al, Gene Ther. 19(4):365-74 (2012) (references are incorporated herein by its entirety). For example, scTCR can be engineered that contains the Vα and Vβ genes from a T cell clone linked by a linker (e.g., a flexible peptide). This approach is very useful to cancer associated target that itself is intracelluar, however, a fragment of such antigen (peptide) is presented on the surface of the cancer cells by MHC.

[0772] In certain embodiments, the encoded antigen binding domain has a binding affinity KD of 10⁻⁴ M to 10⁻⁸ M.

[0773] In one embodiment, the encoded CAR molecule comprises an antigen binding domain that has a binding affinity KD of 10⁻⁴ M to 10⁻⁸ M, e.g., 10⁻⁵ M to 10⁻⁷ M, e.g., 10⁻⁶ M or 10⁻⁷ M, for the target antigen. In one embodiment, the antigen binding domain has a binding affinity that is at least five-fold, 10-fold, 20-fold, 30-fold, 50-fold, 100-fold or 1,000-fold less than a reference antibody, e.g., an antibody described herein. In one embodiment, the encoded antigen binding domain has a binding affinity at least 5-fold less than a reference antibody (e.g., an antibody from which the antigen binding domain is derived). In one aspect such antibody fragments are functional in that they provide a biological response that can include, but is not limited to, activation of an immune response, inhibition of signal-transduction origination from its target antigen, inhibition of kinase activity, and the like, as will be understood by a skilled artisan.

[0774] In one aspect, the antigen binding domain of the CAR is a scFv antibody fragment that is humanized compared to the murine sequence of the scFv from which it is derived.

[0775] In one aspect, the antigen binding domain of a CAR of the invention (e.g., a scFv) is encoded by a nucleic acid molecule whose sequence has been codon optimized for expression in a mammalian cell. In one aspect, entire CAR construct of the invention is encoded by a nucleic acid molecule whose entire sequence has been codon optimized for expression in a mammalian cell. Codon optimization refers to the discovery that the frequency of occurrence of synonymous codons (i.e., codons that code for the same amino acid) in coding DNA is biased in different species. Such codon degeneracy allows an identical polypeptide to be encoded by a variety of nucleotide sequences. A variety of codon optimization methods is known in the art, and include, e.g., methods disclosed in at least U.S. Pat. Nos. 5,786,464 and 6,114,148.

### Antigen Binding Domains (and the Targeted Antigens)

[0776] In one embodiment, an antigen binding domain against CD19 is an antigen binding portion, e.g., CDRs, of a CAR, antibody or antigen-binding fragment thereof described in, e.g., PCT publication WO2012/079000; PCT publication WO2014/153270; Kochenderfer, J. N. et al., J. Immunother. 32 (7), 689-702 (2009); Kochenderfer, J. N., et al., Blood, 116 (20), 4099-4102 (2010); PCT publication WO2014/031687; Bejcek, Cancer Research, 55, 2346-2351, 1995; or U.S. Pat. No. 7,446,190.

[0777] In one embodiment, an antigen binding domain against mesothelin is an antigen binding portion, e.g., CDRs, of an antibody, antigen-binding fragment or CAR described in, e.g., PCT publication WO2015/090230. In one embodiment, an antigen binding domain against mesothelin is an antigen binding portion, e.g., CDRs, of an antibody, antigen-binding fragment, or CAR described in, e.g., PCT publication WO1997/025068, WO1999/028471, WO2005/014652, WO2006/099141, WO2009/045957, WO2009/068204, WO2013/142034, WO2013/040557, or WO2013/063419. In one embodiment, an antigen binding domain against mesothelin is an antigen binding portion, e.g., CDRs, of an antibody, antigen-binding fragment, or CAR described in WO/2015/090230.

[0778] In one embodiment, an antigen binding domain against CD123 is an antigen binding portion, e.g., CDRs, of an antibody, antigen-binding fragment or CAR described in, e.g., PCT publication WO2014/130635. In one embodiment, an antigen binding domain against CD123 is an antigen binding portion, e.g., CDRs, of an antibody, antigen-binding fragment, or CAR described in, e.g., PCT publication WO2014/138805, WO2014/138819, WO2013/173820, WO2014/144622, WO2001/66139, WO2010/126066, WO2014/144622, or US2009/0252742. In one embodiment, an antigen binding domain against CD123 is an antigen binding portion, e.g., CDRs, of an antibody, antigen-binding fragment, or CAR described in WO/2016/028896.

[0779] Examples include CAR molecules which include an antigen binding domain, or a VL and VH (in the sequences below, separated by a (G4S)3 linker (SEQ ID NO: 6594)) of:

CD123-1:
(SEQ ID NO: 7812)
QVQLVQSGAEVKKPGASVKVSCKASGYTFTGYYMHWVRQAPGQGLEWMGWINPNSGGTNYA
QKFQGRVTMTRDTSISTAYMELSRLRSDDTAVYYCARDMNILATVPFDIWGQGTMVTVSSGGG
GSGGGGSGGGGSDIQMTQSPSSLSASVGDRVTITCRASQSISTYLNWYQQKPGKAPNLLIYAAFS
LQSGVPSRFSGSGSGTDFTLTINSLQPEDFATYYCQQGDSVPLTFGGGTKLEIK;
CD123-2:
(SEQ ID NO: 7813)
QVQLVQSGAEVKKPGASVKVSCKASGYTFTGYYMHWVRQAPGQGLEWMGWINPNSGGTNYA
QKFQGRVTLTRDTSISTVYMELSRLRSDDTAVYYCARDMNILATVPFDIWGQGTMVTVSSGGGG
SGGGGSGGGGSDIQMTQSPSSLSASVGDRVTITCRASQSISSYLNWYQQKPGKAPKLLIYAASSL
QSGVPSRFSGSGSGTDFTLTVNSLQPEDFATYYCQQGDSVPLTFGGGTRLEIK;
CD123-3:
(SEQ ID NO: 7814)
QVQLVQSGAEVKKPGASVKVSCKASGYIFTGYYIHWVRQAPGQGLEWMGWINPNSGGTNYAQ
KFQGRVTMTRDTSISTAYMELSGLRSDDPAVYYCARDMNILATVPFDIWGQGTLVTVSSGGGGS
GGGGSGGGGSDIQLTQSPSSLSASVGDRVTITCRASQSISSYLNWYQQKPGKAPKLLIYAASSLQS
GVPSRFSGSGSGTDFTLTVNSLQPEDFATYYCQQGDSVPLTFGGGTKVEIK;
OR
CD123-4:
(SEQ ID NO: 7815)
QVQLQQSGAEVKKSGASVKVSCKASGYTFTDYYMHWLRQAPGQGLEWMGWINPNSGDTNYA
QKFQGRVTLTRDTSISTVYMELSRLRSDDTAVYYCARDMNILATVPFDIWGQGTMVTVSSASGG
GGSGGRASGGGGSDIQMTQSPSSLSASVGDRVTITCRASQSISSYLNWYQQKPGKAPKLLIYAAS
SLQSGVPSRFSGSGSGTDFTLTISSLQPEDFATYYCQQGDSVPLTFGGGTKVEIK,
from WO2016/0028896.
The CAR comprising said anti-CD123 binding domain may comprise, for example, the amino acid
sequence of:
CAR123-2:
(SEQ ID NO: 7816)
MALPVTALLLPLALLLHAARPQVQLVQSGAEVKKPGASVKVSCKASGYTFTGYYMHWVRQAP
GQGLEWMGWINPNSGGTNYAQKFQGRVTLTRDTSISTVYMELSRLRSDDTAVYYCARDMNILA
TVPFDIWGQGTMVTVSSGGGGSGGGGSGGGGSDIQMTQSPSSLSASVGDRVTITCRASQSISSYL
NWYQQKPGKAPKLLIYAASSLQSGVPSRFSGSGSGTDFTLTVNSLQPEDFATYYCQQGDSVPLTF
GGGTRLEIKTTTPAPRPPTPAPTIASQPLSLRPEACRPAAGGAVHTRGLDFACDIYIWAPLAGTCG
VLLLSLVITLYCKRGRKKLLYIFKQPFMRPVQTTQEEDGCSCRFPEEEEGGCELRVKFSRSADAPA
YKQGQNQLYNELNLGRREEYDVLDKRRGRDPEMGGKPRRKNPQEGLYNELQKDKMAEAYSEI
GMKGERRRGKGHDGLYQGLSTATKDTYDALHMQALPPR;
CAR123-3:
(SEQ ID NO: 7817)
MALPVTALLLPLALLLHAARPQVQLVQSGAEVKKPGASVKVSCKASGYIFTGYYIHWVRQAPG
QGLEWMGWINPNSGGTNYAQKFQGRVTMTRDTSISTAYMELSGLRSDDPAVYYCARDMNILAT
VPFDIWGQGTLVTVSSGGGGSGGGGSGGGGSDIQLTQSPSSLSASVGDRVTITCRASQSISSYLN
WYQQKPGKAPKLLIYAASSLQSGVPSRFSGSGSGTDFTLTVNSLQPEDFATYYCQQGDSVPLTFG
GGTKVEIKTTTPAPRPPTPAPTIASQPLSLRPEACRPAAGGAVHTRGLDFACDIYIWAPLAGTCGV
LLLSLVITLYCKRGRKKLLYIFKQPFMRPVQTTQEEDGCSCRFPEEEEGGCELRVKFSRSADAPAY
KQGQNQLYNELNLGRREEYDVLDKRRGRDPEMGGKPRRKNPQEGLYNELQKDKMAEAYSEIG
[sequence omitted];
CAR123-4:
(SEQ ID NO: 7818)
MALPVTALLLPLALLLHAARPQVQLQQSGAEVKKSGASVKVSCKASGYTFTDYYMHWLRQAP
GQGLEWMGWINPNSGDTNYAQKFQGRVTLTRDTSISTVYMELSRLRSDDTAVYYCARDMNILA
TVPFDIWGQGTMVTVSSASGGGGSGGRASGGGGSDIQMTQSPSSLSASVGDRVTITCRASQSISS
YLNWYQQKPGKAPKLLIYAASSLQSGVPSRFSGSGSGTDFTLTISSLQPEDFATYYCQQGDSVPL
TFGGGTKVEIKTTTPAPRPPTPAPTIASQPLSLRPEACRPAAGGAVHTRGLDFACDIYIWAPLAGT
CGVLLLSLVITLYCK;
OR
CAR123-1:
(SEQ ID NO: 7819)
malpvtalllplalllhaarpqvqlvqsgaevkkpgasvkvsckasgytftgyymhwvrqapgqglewmgwinpnsggtnyaqkfqgrvtmtr
dtsistaymelsrlrsddtavyycardmnilatvpfdiwgqgtmvtvssggggsggggsggggsdiqmtqspsslsasvgdrvtitcrasqsistyln
wyqqkpgkapnlliyaafslqsgvpsrfsgsgsgtdftltinslqpedfatyycqqgdsvpltfgggtkleiktttpaprpptpaptiasqplslrpeacr
paaggavhtrgldfacdiyiwaplagtcgvlllslvitlyckrgrkkllyifkqpfmrpvqttqeedgescrfpeeeeggcelrvkfsrsadapaykqg
qnqlynelnlgrreeydvldkrrgrdpemggkprrknpqeglynelqkdkmaeayseigmkgerrrgkghdglyqglstatkdtydalhmqalp
pr.
In each case, the CAR may optionally comprise or not comprise the leader
sequence included in each of the above sequences (MALPVTALLLPLALLLHAARP; SEQ ID NO:
6640).

[0780] In one embodiment, an antigen binding domain against EGFRvIII is an antigen binding portion, e.g., CDRs, of an antibody, antigen-binding fragment or CAR described in, e.g., WO/2014/130657.

[0781] In one embodiment, an antigen binding domain against CD22 is an antigen binding portion, e.g., CDRs, of an antibody described in, e.g., Haso et al., Blood, 121(7): 1165-1174 (2013); Wayne et al., Clin Cancer Res 16(6): 1894-1903 (2010); Kato et al., Leuk Res 37(1):83-88 (2013); Creative BioMart (creativebiomart.net): MOM-18047-S(P).

[0782] In one embodiment, an antigen binding domain against CS-1 is an antigen binding portion, e.g., CDRs, of Elotuzumab (BMS), see e.g., Tai et al., 2008, Blood 112(4):1329-37; Tai et al., 2007, Blood. 110(5):1656-63.

[0783] In one embodiment, an antigen binding domain against CLL-1 is an antigen binding portion, e.g., CDRs, of an antibody available from R&D, ebiosciences, Abcam, for example, PE-CLL1-hu Cat #353604 (BioLegend); and PE-CLL1 (CLEC12A) Cat #562566 (BD). In one embodiment, an antigen binding domain against CLL-1 is an antigen binding portion, e.g., CDRs, of an antibody, antigen-binding fragment, or CAR described in WO/2016/014535.

[0784] In one embodiment, an antigen binding domain against CD33 is an antigen binding portion, e.g., CDRs, of an antibody described in, e.g., Bross et al., Clin Cancer Res 7(6):1490-1496 (2001) (Gemtuzumab Ozogamicin, hP67.6), Caron et al., Cancer Res 52(24):6761-6767 (1992) (Lintuzumab, HuM195), Lapusan et al., Invest New Drugs 30(3):1121-1131 (2012) (AVE9633), Aigner et al., Leukemia 27(5): 1107-1115 (2013) (AMG330, CD33 BiTE), Dutour et al., Adv hematol 2012:683065 (2012), and Pizzitola et al., Leukemia doi:10.1038/Lue.2014.62 (2014). In one embodiment, an antigen binding domain against CD33 is an antigen binding portion, e.g., CDRs, of an antibody, antigen-binding fragment, or CAR described in WO/2016/014576.

[0785] In one embodiment, an antigen binding domain against GD2 is an antigen binding portion, e.g., CDRs, of an antibody described in, e.g., Mujoo et al., Cancer Res. 47(4):1098-1104 (1987); Cheung et al., Cancer Res 45(6):2642-2649 (1985), Cheung et al., J Clin Oncol 5(9):1430-1440 (1987), Cheung et al., J Clin Oncol 16(9):3053-3060 (1998), Handgretinger et al., Cancer Immunol Immunother 35(3):199-204 (1992). In some embodiments, an antigen binding domain against GD2 is an antigen binding portion of an antibody selected from mAb 14.18, 14G2a, ch14.18, hu14.18, 3F8, hu3F8, 3G6, 8B6, 60C3, 10B8, ME36.1, and 8H9, see e.g., WO2012033885, WO2013040371, WO2013192294, WO2013061273, WO2013123061, WO2013074916, and WO201385552. In some embodiments, an antigen binding domain against GD2 is an antigen binding portion of an antibody described in US Publication No.: 20100150910 or PCT Publication No.: WO 2011160119.

[0786] In one embodiment, an antigen binding domain against BCMA is an antigen binding portion, e.g., CDRs, of an antibody described in, e.g., WO2012163805, WO200112812, and WO2003062401. In one embodiment, an antigen binding domain against BCMA is an antigen binding portion, e.g., CDRs, of an antibody, antigen-binding fragment, or CAR described in WO/2016/014565.

[0787] In one embodiment, an antigen binding domain against Tn antigen is an antigen binding portion, e.g., CDRs, of an antibody described in, e.g., U.S. Pat. No. 8,440,798, Brooks et al., PNAS 107(22):10056-10061 (2010), and Stone et al., OncoImmunology 1(6):863-873(2012).

[0788] In one embodiment, an antigen binding domain against PSMA is an antigen binding portion, e.g., CDRs, of an antibody described in, e.g., Parker et al., Protein Expr Purif 89(2):136-145 (2013), US 20110268656 (J591 ScFv); Frigerio et al, European J Cancer 49(9):2223-2232 (2013) (scFvD2B); WO 2006125481 (mAbs 3/A12, 3/E7 and 3/F11) and single chain antibody fragments (scFv A5 and D7).

[0789] In one embodiment, an antigen binding domain against ROR1 is an antigen binding portion, e.g., CDRs, of an antibody described in, e.g., Hudecek et al., Clin Cancer Res 19(12):3153-3164 (2013); WO 2011159847; and US20130101607.

[0790] In one embodiment, an antigen binding domain against FLT3 is an antigen binding portion, e.g., CDRs, of an antibody described in, e.g., WO2011076922, U.S. Pat. No. 5,777,084, EP0754230, US20090297529, and several commercial catalog antibodies (R&D, ebiosciences, Abcam).

[0791] In one embodiment, an antigen binding domain against TAG72 is an antigen binding portion, e.g., CDRs, of an antibody described in, e.g., Hombach et al., Gastroenterology 113(4):1163-1170 (1997); and Abcam ab691.

[0792] In one embodiment, an antigen binding domain against FAP is an antigen binding portion, e.g., CDRs, of an antibody described in, e.g., Ostermann et al., Clinical Cancer Research 14:4584-4592 (2008) (FAP5),

[0793] US Pat. Publication No. 2009/0304718; sibrotuzumab (see e.g., Hofheinz et al., Oncology Research and Treatment 26(1), 2003); and Tran et al., J Exp Med 210(6):1125-1135 (2013).

[0794] In one embodiment, an antigen binding domain against CD38 is an antigen binding portion, e.g., CDRs, of daratumumab (see, e.g., Groen et al., Blood 116(21):1261-1262 (2010); MOR202 (see, e.g., U.S. Pat. No. 8,263,746); or antibodies described in U.S. Pat. No. 8,362,211.

[0795] In one embodiment, an antigen binding domain against CD44v6 is an antigen binding portion, e.g., CDRS, of an antibody described in, e.g., Casucci et al., Blood 122(20):3461-3472 (2013).

[0796] In one embodiment, an antigen binding domain against CEA is an antigen binding portion, e.g., CDRs, of an antibody described in, e.g., Chmielewski et al., Gastroenterology 143(4):1095-1107 (2012).

[0797] In one embodiment, an antigen binding domain against EPCAM is an antigen binding portion, e.g., CDRS, of an antibody selected from MT110, EpCAM-CD3 bispecific Ab (see, e.g., clinicaltrials.gov/ct2/show/NCT00635596); Edrecolomab; 3622W94; ING-1; and adecatumumab (MT201).

[0798] In one embodiment, an antigen binding domain against PRSS21 is an antigen binding portion, e.g., CDRs, of an antibody described in U.S. Pat. No. 8,080,650.

[0799] In one embodiment, an antigen binding domain against B7H3 is an antigen binding portion, e.g., CDRs, of an antibody MGA271 (Macrogenics).

[0800] In one embodiment, an antigen binding domain against KIT is an antigen binding portion, e.g., CDRs, of an antibody described in, e.g., U.S. Pat. No. 7,915,391, US20120288506, and several commercial catalog antibodies.

[0801] In one embodiment, an antigen binding domain against IL-13Ra2 is an antigen binding portion, e.g., CDRS, of an antibody described in, e.g., WO2008/146911, WO2004087758, several commercial catalog antibodies, and WO2004087758.

[0802] In one embodiment, an antigen binding domain against CD30 is an antigen binding portion, e.g., CDRs, of an antibody described in, e.g., U.S. Pat. No. 7,090,843 B1, and EP0805871.

[0803] In one embodiment, an antigen binding domain against GD3 is an antigen binding portion, e.g., CDRs, of an antibody described in, e.g., U.S. Pat. Nos. 7,253,263; 8,207,308; US 20120276046; EP1013761; WO2005035577; and U.S. Pat. No. 6,437,098.

[0804] In one embodiment, an antigen binding domain against CD171 is an antigen binding portion, e.g., CDRS, of an antibody described in, e.g., Hong et al., J Immunother 37(2):93-104 (2014).

[0805] In one embodiment, an antigen binding domain against IL-11Ra is an antigen binding portion, e.g., CDRs, of an antibody available from Abcam (cat #ab55262) or Novus Biologicals (cat #EPR5446). In another embodiment, an antigen binding domain again IL-11Ra is a peptide, see, e.g., Huang et al., Cancer Res 72(1):271-281 (2012).

[0806] In one embodiment, an antigen binding domain against PSCA is an antigen binding portion, e.g., CDRs, of an antibody described in, e.g., Morgenroth et al., Prostate 67(10):1121-1131 (2007) (scFv 7F5); Nejatollahi et al., J of Oncology 2013(2013), article ID 839831 (scFv C5-II); and US Pat Publication No. 20090311181.

[0807] In one embodiment, an antigen binding domain against VEGFR2 is an antigen binding portion, e.g., CDRs, of an antibody described in, e.g., Chinnasamy et al., J Clin Invest 120(11):3953-3968 (2010).

[0808] In one embodiment, an antigen binding domain against LewisY is an antigen binding portion, e.g., CDRs, of an antibody described in, e.g., Kelly et al., Cancer Biother Radiopharm 23(4):411-423 (2008) (hu3S193 Ab (scFvs)); Dolezal et al., Protein Engineering 16(1):47-56 (2003) (NC10 scFv).

[0809] In one embodiment, an antigen binding domain against CD24 is an antigen binding portion, e.g., CDRs, of an antibody described in, e.g., Maliar et al., Gastroenterology 143(5):1375-1384 (2012).

[0810] In one embodiment, an antigen binding domain against PDGFR-beta is an antigen binding portion, e.g., CDRs, of an antibody Abcam ab32570.

[0811] In one embodiment, an antigen binding domain against SSEA-4 is an antigen binding portion, e.g., CDRs, of antibody MC813 (Cell Signaling), or other commercially available antibodies.

[0812] In one embodiment, an antigen binding domain against CD20 is an antigen binding portion, e.g., CDRs, of the antibody Rituximab, Ofatumumab, Ocrelizumab, Veltuzumab, or GA101.

[0813] In one embodiment, an antigen binding domain against Folate receptor alpha is an antigen binding portion, e.g., CDRs, of the antibody IMGN853, or an antibody described in US20120009181; U.S. Pat. No. 4,851,332, LK26: U.S. Pat. No. 5,952,484.

[0814] In one embodiment, an antigen binding domain against ERBB2 (Her2/neu) is an antigen binding portion, e.g., CDRs, of the antibody trastuzumab, or pertuzumab.

[0815] In one embodiment, an antigen binding domain against MUC1 is an antigen binding portion, e.g., CDRs, of the antibody SAR566658.

[0816] In one embodiment, the antigen binding domain against EGFR is antigen binding portion, e.g., CDRs, of the antibody cetuximab, panitumumab, zalutumumab, nimotuzumab, or matuzumab.

[0817] In one embodiment, an antigen binding domain against NCAM is an antigen binding portion, e.g., CDRs, of the antibody clone 2-2B: MAB5324 (EMD Millipore).

[0818] In one embodiment, an antigen binding domain against Ephrin B2 is an antigen binding portion, e.g., CDRs, of an antibody described in, e.g., Abengozar et al., Blood 119(19):4565-4576 (2012).

[0819] In one embodiment, an antigen binding domain against IGF-I receptor is an antigen binding portion, e.g., CDRs, of an antibody described in, e.g., U.S. Pat. No. 8,344,112 B2; EP2322550 A1; WO 2006/138315, or PCT/US2006/022995.

[0820] In one embodiment, an antigen binding domain against CAIX is an antigen binding portion, e.g., CDRs, of the antibody clone 303123 (R&D Systems).

[0821] In one embodiment, an antigen binding domain against LMP2 is an antigen binding portion, e.g., CDRs, of an antibody described in, e.g., U.S. Pat. No. 7,410,640, or US20050129701.

[0822] In one embodiment, an antigen binding domain against gp100 is an antigen binding portion, e.g., CDRs, of the antibody HMB45, NKIbetaB, or an antibody described in WO2013165940, or US20130295007

[0823] In one embodiment, an antigen binding domain against tyrosinase is an antigen binding portion, e.g., CDRs, of an antibody described in, e.g., U.S. Pat. No. 5,843,674; or US19950504048.

[0824] In one embodiment, an antigen binding domain against EphA2 is an antigen binding portion, e.g., CDRs, of an antibody described in, e.g., Yu et al., Mol Ther 22(1):102-111 (2014).

[0825] In one embodiment, an antigen binding domain against GD3 is an antigen binding portion, e.g., CDRs, of an antibody described in, e.g., U.S. Pat. Nos. 7,253,263; 8,207,308; US 20120276046; EP1013761 A3; 20120276046; WO2005035577; or U.S. Pat. No. 6,437,098.

[0826] In one embodiment, an antigen binding domain against fucosyl GM1 is an antigen binding portion, e.g., CDRs, of an antibody described in, e.g., US20100297138; or WO2007/067992.

[0827] In one embodiment, an antigen binding domain against sLe is an antigen binding portion, e.g., CDRs, of the antibody G193 (for lewis Y), see Scott A M et al, Cancer Res 60: 3254-61 (2000), also as described in Neeson et al, J Immunol May 2013 190 (Meeting Abstract Supplement) 177.10.

[0828] In one embodiment, an antigen binding domain against GM3 is an antigen binding portion, e.g., CDRs, of the antibody CA 2523449 (mAb 14F7).

[0829] In one embodiment, an antigen binding domain against HMWMAA is an antigen binding portion, e.g., CDRs, of an antibody described in, e.g., Kmiecik et al., Oncoimmunology 3(1):e27185 (2014) (PMID: 24575382) (mAb9.2.27); U.S. Pat. No. 6,528,481; WO2010033866; or US 20140004124.

[0830] In one embodiment, an antigen binding domain against o-acetyl-GD2 is an antigen binding portion, e.g., CDRs, of the antibody 8B6.

[0831] In one embodiment, an antigen binding domain against TEM1/CD248 is an antigen binding portion, e.g., CDRs, of an antibody described in, e.g., Marty et al., Cancer Lett 235(2):298-308 (2006); Zhao et al., J Immunol Methods 363(2):221-232 (2011).

[0832] In one embodiment, an antigen binding domain against CLDN6 is an antigen binding portion, e.g., CDRs, of the antibody IMAB027 (Ganymed Pharmaceuticals), see e.g., clinicaltrial.gov/show/NCT02054351.

[0833] In one embodiment, an antigen binding domain against TSHR is an antigen binding portion, e.g., CDRs, of an antibody described in, e.g., U.S. Pat. Nos. 8,603,466; 8,501,415; or U.S. Pat. No. 8,309,693.

[0834] In one embodiment, an antigen binding domain against GPRC5D is an antigen binding portion, e.g., CDRs, of the antibody FAB6300A (R&D Systems); or LS-A4180 (Lifespan Biosciences).

[0835] In one embodiment, an antigen binding domain against CD97 is an antigen binding portion, e.g., CDRs, of an antibody described in, e.g., U.S. Pat. No. 6,846,911; de Groot et al., J Immunol 183(6):4127-4134 (2009); or an antibody from R&D:MAB3734.

[0836] In one embodiment, an antigen binding domain against ALK is an antigen binding portion, e.g., CDRs, of an antibody described in, e.g., Mino-Kenudson et al., Clin Cancer Res 16(5):1561-1571 (2010).

[0837] In one embodiment, an antigen binding domain against polysialic acid is an antigen binding portion, e.g., CDRs, of an antibody described in, e.g., Nagae et al., J Biol Chem 288(47):33784-33796 (2013).

[0838] In one embodiment, an antigen binding domain against PLAC1 is an antigen binding portion, e.g., CDRs, of an antibody described in, e.g., Ghods et al., Biotechnol Appl Biochem 2013 doi:10.1002/bab.1177.

[0839] In one embodiment, an antigen binding domain against GloboH is an antigen binding portion of the antibody VK9; or an antibody described in, e.g., Kudryashov V et al, Glycoconj J. 15(3):243-9 (1998), Lou et al., Proc Natl Acad Sci USA 111(7):2482-2487 (2014); MBr1: Bremer E G et al. J Biol Chem 259:14773-14777 (1984).

[0840] In one embodiment, an antigen binding domain against NY-BR-1 is an antigen binding portion, e.g., CDRs of an antibody described in, e.g., Jager et al., Appl Immunohistochem Mol Morphol 15(1):77-83 (2007).

[0841] In one embodiment, an antigen binding domain against WT-1 is an antigen binding portion, e.g., CDRs, of an antibody described in, e.g., Dao et al., Sci Transl Med 5(176):176ra33 (2013); or WO2012/135854.

[0842] In one embodiment, an antigen binding domain against MAGE-A1 is an antigen binding portion, e.g., CDRs, of an antibody described in, e.g., Willemsen et al., J Immunol 174(12):7853-7858 (2005) (TCR-like scFv).

[0843] In one embodiment, an antigen binding domain against sperm protein 17 is an antigen binding portion, e.g., CDRs, of an antibody described in, e.g., Song et al., Target Oncol 2013 Aug. 14 (PMID: 23943313); Song et al., Med Oncol 29(4):2923-2931 (2012).

[0844] In one embodiment, an antigen binding domain against Tie 2 is an antigen binding portion, e.g., CDRs, of the antibody AB33 (Cell Signaling Technology).

[0845] In one embodiment, an antigen binding domain against MAD-CT-2 is an antigen binding portion, e.g., CDRs, of an antibody described in, e.g., PMID: 2450952; U.S. Pat. No. 7,635,753.

[0846] In one embodiment, an antigen binding domain against Fos-related antigen 1 is an antigen binding portion, e.g., CDRs, of the antibody 12F9 (Novus Biologicals).

[0847] In one embodiment, an antigen binding domain against MelanA/MART1 is an antigen binding portion, e.g., CDRs, of an antibody described in, EP2514766 A2; or U.S. Pat. No. 7,749,719.

[0848] In one embodiment, an antigen binding domain against sarcoma translocation breakpoints is an antigen binding portion, e.g., CDRs, of an antibody described in, e.g., Luo et al, EMBO Mol. Med. 4(6):453-461 (2012).

[0849] In one embodiment, an antigen binding domain against TRP-2 is an antigen binding portion, e.g., CDRs, of an antibody described in, e.g., Wang et al, J Exp Med. 184(6):2207-16 (1996).

[0850] In one embodiment, an antigen binding domain against CYP1B1 is an antigen binding portion, e.g., CDRs, of an antibody described in, e.g., Maecker et al, Blood 102 (9): 3287-3294 (2003).

[0851] In one embodiment, an antigen binding domain against RAGE-1 is an antigen binding portion, e.g., CDRs, of the antibody MAB5328 (EMD Millipore).

[0852] In one embodiment, an antigen binding domain against human telomerase reverse transcriptase is an antigen binding portion, e.g., CDRs, of the antibody cat no: LS-B95-100 (Lifespan Biosciences) In one embodiment, an antigen binding domain against intestinal carboxyl esterase is an antigen binding portion, e.g., CDRs, of the antibody 4F12: cat no: LS-B6190-50 (Lifespan Biosciences).

[0853] In one embodiment, an antigen binding domain against mut hsp70-2 is an antigen binding portion, e.g., CDRs, of the antibody Lifespan Biosciences: monoclonal: cat no: LS-C133261-100 (Lifespan Biosciences).

[0854] In one embodiment, an antigen binding domain against CD79a is an antigen binding portion, e.g., CDRs, of the antibody Anti-CD79a antibody [HM47/A9] (ab3121), available from Abcam; antibody CD79A Antibody #3351 available from Cell Signalling Technology; or antibody HPA017748—Anti-CD79A antibody produced in rabbit, available from Sigma Aldrich.

[0855] In one embodiment, an antigen binding domain against CD79b is an antigen binding portion, e.g., CDRs, of the antibody polatuzumab vedotin, anti-CD79b described in Doman et al., “Therapeutic potential of an anti-CD79b antibody-drug conjugate, anti-CD79b-vc-MMAE, for the treatment of non-Hodgkin lymphoma” Blood. 2009 Sep. 24; 114(13):2721-9. doi: 10.1182/blood-2009-02-205500. Epub 2009 Jul. 24, or the bispecific antibody Anti-CD79b/CD3 described in “4507 Pre-Clinical Characterization of T Cell-Dependent Bispecific Antibody Anti-CD79b/CD3 As a Potential Therapy for B Cell Malignancies” Abstracts of 56^{th} ASH Annual Meeting and Exposition, San Francisco, CA Dec. 6-9, 2014.

[0856] In one embodiment, an antigen binding domain against CD72 is an antigen binding portion, e.g., CDRs, of the antibody J3-109 described in Myers, and Uckun, “An anti-CD72 immunotoxin against therapy-refractory B-lineage acute lymphoblastic leukemia.” Leuk Lymphoma. 1995 June; 18(1-2):119-22, or anti-CD72 (10D6.8.1, mIgG1) described in Polson et al., “Antibody-Drug Conjugates for the Treatment of Non-Hodgkin's Lymphoma: Target and Linker-Drug Selection” Cancer Res Mar. 15, 2009 69; 2358.

[0857] In one embodiment, an antigen binding domain against LAIR1 is an antigen binding portion, e.g., CDRs, of the antibody ANT-301 LAIR1 antibody, available from ProSpec; or anti-human CD305 (LAIR1) Antibody, available from BioLegend.

[0858] In one embodiment, an antigen binding domain against FCAR is an antigen binding portion, e.g., CDRs, of the antibody CD89/FCARAntibody (Catalog #10414-H08H), available from Sino Biological Inc.

[0859] In one embodiment, an antigen binding domain against LILRA2 is an antigen binding portion, e.g., CDRs, of the antibody LILRA2 monoclonal antibody (M17), clone 3C7, available from Abnova, or Mouse Anti-LILRA2 antibody, Monoclonal (2D7), available from Lifespan Biosciences.

[0860] In one embodiment, an antigen binding domain against CD300LF is an antigen binding portion, e.g., CDRs, of the antibody Mouse Anti-CMRF35-like molecule 1 antibody, Monoclonal[UP-D2, available from BioLegend, or Rat Anti-CMRF35-like molecule 1 antibody, Monoclonal[234903], available from R&D Systems.

[0861] In one embodiment, an antigen binding domain against CLEC12A is an antigen binding portion, e.g., CDRs, of the antibody Bispecific T cell Engager (BiTE) scFv-antibody and ADC described in Noordhuis et al., “Targeting of CLEC12A In Acute Myeloid Leukemia by Antibody-Drug-Conjugates and Bispecific CLL-1×CD3 BiTE Antibody” 53^{rd} ASH Annual Meeting and Exposition, Dec. 10-13, 2011, and MCLA-117 (Merus).

[0862] In one embodiment, an antigen binding domain against BST2 (also called CD317) is an antigen binding portion, e.g., CDRs, of the antibody Mouse Anti-CD317 antibody, Monoclonal[3H4], available from Antibodies-Online or Mouse Anti-CD317 antibody, Monoclonal [696739], available from R&D Systems.

[0863] In one embodiment, an antigen binding domain against EMR2 (also called CD312) is an antigen binding portion, e.g., CDRs, of the antibody Mouse Anti-CD312 antibody, Monoclonal[LS-B8033] available from Lifespan Biosciences, or Mouse Anti-CD312 antibody, Monoclonal [494025] available from R&D Systems.

[0864] In one embodiment, an antigen binding domain against LY75 is an antigen binding portion, e.g., CDRs, of the antibody Mouse Anti-Lymphocyte antigen 75 antibody, Monoclonal[HD30] available from EMD Millipore or Mouse Anti-Lymphocyte antigen 75 antibody, Monoclonal[A15797] available from Life Technologies.

[0865] In one embodiment, an antigen binding domain against GPC3 is an antigen binding portion, e.g., CDRs, of the antibody hGC33 described in Nakano K, Ishiguro T, Konishi H, et al. Generation of a humanized anti-glypican 3 antibody by CDR grafting and stability optimization. Anticancer Drugs. 2010 November; 21(10):907-916, or MDX-1414, HN3, or YP7, all three of which are described in Feng et al., “Glypican-3 antibodies: a new therapeutic target for liver cancer.” FEBS Lett. 2014 Jan. 21; 588(2):377-82.

[0866] In one embodiment, an antigen binding domain against FCRL5 is an antigen binding portion, e.g., CDRs, of the anti-FcRL5 antibody described in Elkins et al., “FcRL5 as a target of antibody-drug conjugates for the treatment of multiple myeloma” Mol Cancer Ther. 2012 October; 11(10):2222-32. In one embodiment, an antigen binding domain against FCRL5 is an antigen binding portion, e.g., CDRs, of the anti-FcRL5 antibody described in, for example, WO2001/038490, WO/2005/117986, WO2006/039238, WO2006/076691, WO2010/114940, WO2010/120561, or WO2014/210064.

[0867] In one embodiment, an antigen binding domain against IGLL1 is an antigen binding portion, e.g., CDRs, of the antibody Mouse Anti-Immunoglobulin lambda-like polypeptide 1 antibody, Monoclonal[AT1G4] available from Lifespan Biosciences, Mouse Anti-Immunoglobulin lambda-like polypeptide 1 antibody, Monoclonal[HSL11] available from BioLegend.

[0868] In one embodiment, the antigen binding domain comprises one, two three (e.g., all three) heavy chain CDRs, HC CDR1, HC CDR2 and HC CDR3, from an antibody listed above, and/or one, two, three (e.g., all three) light chain CDRs, LC CDR1, LC CDR2 and LC CDR3, from an antibody listed above. In one embodiment, the antigen binding domain comprises a heavy chain variable region and/or a variable light chain region of an antibody listed above.

[0869] In another aspect, the antigen binding domain comprises a humanized antibody or an antibody fragment. In some aspects, a non-human antibody is humanized, where specific sequences or regions of the antibody are modified to increase similarity to an antibody naturally produced in a human or fragment thereof. In one aspect, the antigen binding domain is humanized.

[0870] In an embodiment, the antigen-binding domain of a CAR, e.g., a CAR expressed by a cell of the invention, binds to CD19. CD19 is found on B cells throughout differentiation of the lineage from the pro/pre-B cell stage through the terminally differentiated plasma cell stage. In an embodiment, the antigen binding domain is a murine scFv domain that binds to human CD19, e.g., the antigen binding domain of CTL019 (e.g., SEQ ID NO: 7895). In an embodiment, the antigen binding domain is a humanized antibody or antibody fragment, e.g., scFv domain, derived from the murine CTL019 scFv. In an embodiment, the antigen binding domain is a human antibody or antibody fragment that binds to human CD19. Exemplary scFv domains (and their sequences, e.g., CDRs, VL and VH sequences) that bind to CD19 are provided in Table 14. The scFv domain sequences provided in Table 14 include a light chain variable region (VL) and a heavy chain variable region (VH). The VL and VH are attached by a linker comprising the sequence GGGGSGGGGSGGGGS (SEQ ID NO: 6594), e.g., in the following orientation: VL-linker-VH.

TABLE 14
Antigen Binding domains that bind CD19

| | | | SEQ |
|---|---|---|---|
| | | | ID |
| Antigen | Name | Amino Acid Sequence | NO: |
| CD19 | muCTL019 | DIQMTQTTSSLSASLGDRVTISCRASQDISKYLNWYQQKPDGTVKLLI | 7895 |
| | | YHTSRLHSGVPSRESGSGSGTDYSLTISNLEQEDIATYFCQQGNTLPY | |
| | | TFGGGTKLEITGGGGSGGGGSGGGGSEVKLQESGPGLVAPSQSLSVTC | |
| | | TVSGVSLPDYGVSWIRQPPRKGLEWLGVIWGSETTYYNSALKSRLTII | |
| | | KDNSKSQVFLKMNSLQTDDTAIYYCAKHYYYGGSYAMDYWGQGTSVTV | |
| | | SS | |
| CD19 | huscFv1 | EIVMTQSPATLSLSPGERATLSCRASQDISKYLNWYQQKPGQAPRLLI | 7883 |
| | | YHTSRLHSGIPARFSGSGSGTDYTLTISSLQPEDFAVYFCQQGNTLPY | |
| | | TFGQGTKLEIKGGGGSGGGGSGGGGSQVQLQESGPGLVKPSETLSLTC | |
| | | TVSGVSLPDYGVSWIRQPPGKGLEWIGVIWGSETTYYSSSLKSRVTIS | |
| | | KDNSKNQVSLKLSSVTAADTAVYYCAKHYYYGGSYAMDYWGQGTLVTV | |
| | | SS | |
| CD19 | huscFv2 | EIVMTQSPATLSLSPGERATLSCRASQDISKYLNWYQQKPGQAPRLLI | 7884 |
| | | YHTSRLHSGIPARFSGSGSGTDYTLTISSLOPEDFAVYFCQQGNTLPY | |
| | | TFGQGTKLEIKGGGGSGGGGSGGGGSQVQLQESGPGLVKPSETLSLTC | |
| | | TVSGVSLPDYGVSWIRQPPGKGLEWIGVIWGSETTYYQSSLKSRVTIS | |
| | | KDNSKNQVSLKLSSVTAADTAVYYCAKHYYYGGSYAMDYWGQGTLVTV | |
| | | SS | |
| CD19 | huscFv3 | QVQLQESGPGLVKPSETLSLTCTVSGVSLPDYGVSWIRQPPGKGLEWI | 7885 |
| | | GVIWGSETTYYSSSLKSRVTISKDNSKNQVSLKLSSVTAADTAVYYCA | |
| | | KHYYYGGSYAMDYWGQGTLVTVSSGGGGSGGGGSGGGGSEIVMTQSPA | |
| | | TLSLSPGERATLSCRASQDISKYLNWYQQKPGQAPRLLIYHTSRLHSG | |
| | | IPARFSGSGSGTDYTLTISSLQPEDFAVYFCQQGNTLPYTFGQGTKLE | |
| | | IK | |
| CD19 | huscFv4 | QVQLQESGPGLVKPSETLSLTCTVSGVSLPDYGVSWIRQPPGKGLEWI | 7886 |
| | | GVIWGSETTYYQSSLKSRVTISKDNSKNQVSLKLSSVTAADTAVYYCA | |
| | | KHYYYGGSYAMDYWGQGTLVTVSSGGGGSGGGGSGGGGSEIVMTQSPA | |
| | | TLSLSPGERATLSCRASQDISKYLNWYQQKPGQAPRLLIYHTSRLHSG | |
| | | IPARFSGSGSGTDYTLTISSLOPEDFAVYFCQQGNTLPYTFGQGTKLE | |
| | | IK | |
| CD19 | huscFv5 | EIVMTQSPATLSLSPGERATLSCRASQDISKYLNWYQQKPGQAPRLLI | 7887 |
| | | YHTSRLHSGIPARFSGSGSGTDYTLTISSLQPEDFAVYFCQQGNTLPY | |
| | | TFGQGTKLEIKGGGGSGGGGSGGGGSGGGGSQVQLQESGPGLVKPSET | |
| | | LSLTCTVSGVSLPDYGVSWIRQPPGKGLEWIGVIWGSETTYYSSSLKS | |
| | | RVTISKDNSKNQVSLKLSSVTAADTAVYYCAKHYYYGGSYAMDYWGQG | |
| | | TLVTVSS | |
| CD19 | huscFv6 | EIVMTQSPATLSLSPGERATLSCRASQDISKYLNWYQQKPGQAPRLLI | 7888 |
| | | YHTSRLHSGIPARFSGSGSGTDYTLTISSLOPEDFAVYFCQQGNTLPY | |
| | | TFGQGTKLEIKGGGGSGGGGSGGGGSGGGGSQVQLQESGPGLVKPSET | |
| | | LSLTCTVSGVSLPDYGVSWIRQPPGKGLEWIGVIWGSETTYYQSSLKS | |
| | | RVTISKDNSKNQVSLKLSSVTAADTAVYYCAKHYYYGGSYAMDYWGQG | |
| | | TLVTVSS | |
| CD19 | huscFv7 | QVQLQESGPGLVKPSETLSLTCTVSGVSLPDYGVSWIRQPPGKGLEWI | 7889 |
| | | GVIWGSETTYYSSSLKSRVTISKDNSKNQVSLKLSSVTAADTAVYYCA | |
| | | KHYYYGGSYAMDYWGQGTLVTVSSGGGGSGGGGSGGGGSGGGGSEIVM | |
| | | TQSPATLSLSPGERATLSCRASQDISKYLNWYQQKPGQAPRLLIYHTS | |
| | | RLHSGIPARFSGSGSGTDYTLTISSLOPEDFAVYFCQQGNTLPYTFGQ | |
| | | GTKLEIK | |
| CD19 | huscFv8 | QVQLQESGPGLVKPSETLSLTCTVSGVSLPDYGVSWIRQPPGKGLEWI | 7890 |
| | | GVIWGSETTYYQSSLKSRVTISKDNSKNQVSLKLSSVTAADTAVYYCA | |
| | | KHYYYGGSYAMDYWGQGTLVTVSSGGGGSGGGGSGGGGSGGGGSEIVM | |
| | | TQSPATLSLSPGERATLSCRASQDISKYLNWYQQKPGQAPRLLIYHTS | |
| | | RLHSGIPARFSGSGSGTDYTLTISSLOPEDFAVYFCQQGNTLPYTFGQ | |
| | | GTKLEIK | |
| CD19 | huscFv9 | EIVMTQSPATLSLSPGERATLSCRASQDISKYLNWYQQKPGQAPRLLI | 7891 |
| | | YHTSRLHSGIPARFSGSGSGTDYTLTISSLQPEDFAVYFCQQGNTLPY | |
| | | TFGQGTKLEIKGGGGSGGGGSGGGGSGGGGSQVQLQESGPGLVKPSET | |
| | | LSLTCTVSGVSLPDYGVSWIRQPPGKGLEWIGVIWGSETTYYNSSLKS | |
| | | RVTISKDNSKNQVSLKLSSVTAADTAVYYCAKHYYYGGSYAMDYWGQG | |
| | | TLVTVSS | |
| CD19 | HuscFv10 | QVQLQESGPGLVKPSETLSLTCTVSGVSLPDYGVSWIRQPPGKGLEWI | 7892 |
| | | GVIWGSETTYYNSSLKSRVTISKDNSKNQVSLKLSSVTAADTAVYYCA | |
| | | KHYYYGGSYAMDYWGQGTLVTVSSGGGGSGGGGSGGGGSGGGGSEIVM | |
| | | TQSPATLSLSPGERATLSCRASQDISKYLNWYQQKPGQAPRLLIYHTS | |
| | | RLHSGIPARFSGSGSGTDYTLTISSLOPEDFAVYFCQQGNTLPYTFGQ | |
| | | GTKLEIK | |
| CD19 | HuscFv11 | EIVMTQSPATLSLSPGERATLSCRASQDISKYLNWYQQKPGQAPRLLI | 7893 |
| | | YHTSRLHSGIPARFSGSGSGTDYTLTISSLOPEDFAVYFCQQGNTLPY | |
| | | TFGQGTKLEIKGGGGSGGGGSGGGGSQVQLQESGPGLVKPSETLSLTC | |
| | | TVSGVSLPDYGVSWIRQPPGKGLEWIGVIWGSETTYYNSSLKSRVTIS | |
| | | KDNSKNQVSLKLSSVTAADTAVYYCAKHYYYGGSYAMDYWGQGTLVTV | |
| | | SS | |
| CD19 | HuscFv12 | QVQLQESGPGLVKPSETLSLTCTVSGVSLPDYGVSWIRQPPGKGLEWI | 7894 |
| | | GVIWGSETTYYNSSLKSRVTISKDNSKNQVSLKLSSVTAADTAVYYCA | |
| | | KHYYYGGSYAMDYWGQGTLVTVSSGGGGSGGGGSGGGGSEIVMTQSPA | |
| | | TLSLSPGERATLSCRASQDISKYLNWYQQKPGQAPRLLIYHTSRLHSG | |
| | | IPARFSGSGSGTDYTLTISSLOPEDFAVYFCQQGNTLPYTFGQGTKLE | |
| | | IK | |

[0871] The sequences of the CDR sequences of the scFv domains of the CD19 antigen binding domains provided in Table 14 are shown in Table 15 for the heavy chain variable domains and in Table 16 for the light chain variable domains. “ID” stands for the respective SEQ ID NO for each CDR.

TABLE 15
Heavy Chain Variable Domain CDRs

| Description | FW | HCDR1 | ID | HCDR2 | ID | HCDR3 | ID |
|---|---|---|---|---|---|---|---|
| murine_CART19 | | GVSLPDYGVS | 7899 | VIWGSETTYYNSALKS | 7900 | HYYYGGSYAMDY | 7904 |
| humanized_CART19 a | VH4 | GVSLPDYGVS | 7899 | VIWGSETTYYSSSLKS | 7901 | HYYYGGSYAMDY | 7904 |
| humanized_CART19 b | VH4 | GVSLPDYGVS | 7899 | VIWGSETTYYQSSLKS | 7902 | HYYYGGSYAMDY | 7904 |
| humanized_CART19 c | VH4 | GVSLPDYGVS | 7899 | VIWGSETTYYNSSLKS | 7903 | HYYYGGSYAMDY | 7904 |

TABLE 16
Light Chain Variable Domain CDRs

| Description | FW | LCDR1 | ID | LCDR2 | ID | LCDR3 | ID |
|---|---|---|---|---|---|---|---|
| murine_CART19 | | RASQDISKYLN | 7905 | HTSRLHS | 7906 | QQGNTLPYT | 7907 |
| humanized_CART19 a | VK3 | RASQDISKYLN | 7905 | HTSRLHS | 7906 | QQGNTLPYT | 7907 |
| humanized_CART19 b | VK3 | RASQDISKYLN | 7905 | HTSRLHS | 7906 | QQGNTLPYT | 7907 |
| humanized_CART19 c | VK3 | RASQDISKYLN | 7905 | HTSRLHS | 7906 | QQGNTLPYT | 7907 |

[0872] In an embodiment, the antigen binding domain comprises an anti-CD19 antibody, or fragment thereof, e.g., an scFv. For example, the antigen binding domain comprises a variable heavy chain and a variable light chain listed in Table 17. The linker sequence joining the variable heavy and variable light chains can be any of the linker sequences described herein, or alternatively, can be GSTSGSGKPGSGEGSTKG (SEQ ID NO: 8167). The light chain variable region and heavy chain variable region of a scFv can be, e.g., in any of the following orientations: light chain variable region-linker-heavy chain variable region or heavy chain variable region-linker-light chain variable region.

TABLE 17
Additional Anti-CD19 antibody binding domains

| Ab | | |
|---|---|---|
| Name | VH Sequence | VL Sequence |
| SJ25-C1 | QVQLLESGAELVRPGSSVKISCKASG | ELVLTQSPKFMSTSVGDRVSVTCKASQNV |
| | YAFSSYWMNWVKORPGQGLEWIGQIY | GTNVAWYQQKPGQSPKPLIYSATYRNSGV |
| | PGDGDTNYNGKFKGQATLTADKSSST | PDRFTGSGSGTDFTLTITNVQSKDLADYF |
| | AYMQLSGLTSEDSAVYSCARKTISSV | YFCQYNRYPYTSGGGTKLEIKRRS (SEQ |
| | VDFYFDYWGQGTTVT (SEQ ID | ID NO: 7897) |
| | NO: 7896) | |

| | ScFv Sequence |
|---|---|
| SJ25-C1 | QVQLLESGAELVRPGSSVKISCKASGYAFSSYWMNWVKQRPGQGLEWIGQIYPGDGD |
| scFv | TNYNGKFKGQATLTADKSSSTAYMQLSGLTSEDSAVYSCARKTISSVVDFYFDYWGQ |
| | GTTVTGSTSGSGKPGSGEGSTKGELVLTQSPKFMSTSVGDRVSVTCKASQNVGTNVA |
| | WYQQKPGQSPKPLIYSATYRNSGVPDRFTGSGSGTDFTLTITNVQSKDLADYFYFCQ |
| | YNRYPYTSGGGTKLEIKRRS (SEQ ID NO: 7898) |

[0873] In one embodiment, the CD19 binding domain comprises one or more (e.g., all three) light chain complementary determining region 1 (LC CDR1), light chain complementary determining region 2 (LC CDR2), and light chain complementary determining region 3 (LC CDR3) of a CD19 binding domain described herein, e.g., provided in Table 14 or 15, and/or one or more (e.g., all three) heavy chain complementary determining region 1 (HC CDR1), heavy chain complementary determining region 2 (HC CDR2), and heavy chain complementary determining region 3 (HC CDR3) of a CD19 binding domain described herein, e.g., provided in Table 14 or 16. In one embodiment, the CD19 binding domain comprises one, two, or all of LC CDR1, LC CDR2, and LC CDR3 of any amino acid sequences as provided in Table 16, incorporated herein by reference; and one, two or all of HC CDR1, HC CDR2, and HC CDR3 of any amino acid sequences as provided in Table 15.

[0874] In one embodiment, the CD19 antigen binding domain comprises:
[0875] (i) (a) a LC CDR1 amino acid sequence of SEQ ID NO: 7905, a LC CDR2 amino acid sequence of SEQ ID NO: 7906, and a LC CDR3 amino acid sequence of SEQ ID NO: 7907; and
   [0876] (b) a HC CDR1 amino acid sequence of SEQ ID NO: 7899, a HC CDR2 amino acid sequence of SEQ ID NO: 7900, and a HC CDR3 amino acid sequence of SEQ ID NO: 7904
[0877] (ii) (a) a LC CDR1 amino acid sequence of SEQ ID NO: 7905, a LC CDR2 amino acid sequence of SEQ ID NO: 7906, and a LC CDR3 amino acid sequence of SEQ ID NO: 7907; and
   [0878] (b) a HC CDR1 amino acid sequence of SEQ ID NO: 7899, a HC CDR2 amino acid sequence of SEQ ID NO: 7901, and a HC CDR3 amino acid sequence of SEQ ID NO: 7904;
[0879] (iii) (a) a LC CDR1 amino acid sequence of SEQ ID NO: 7905, a LC CDR2 amino acid sequence of SEQ ID NO: 7906, and a LC CDR3 amino acid sequence of SEQ ID NO: 7907; and
   [0880] (b) a HC CDR1 amino acid sequence of SEQ ID NO: 7899, a HC CDR2 amino acid sequence of SEQ ID NO: 7902, and a HC CDR3 amino acid sequence of SEQ ID NO: 7904; or
[0881] (iv) (a) a LC CDR1 amino acid sequence of SEQ ID NO: 7905, a LC CDR2 amino acid sequence of SEQ ID NO: 7906, and a LC CDR3 amino acid sequence of SEQ ID NO: 7907; and
   [0882] (b) a HC CDR1 amino acid sequence of SEQ ID NO: 7899, a HC CDR2 amino acid sequence of SEQ ID NO: 7903, and a HC CDR3 amino acid sequence of SEQ ID NO: 7904.

[0883] In one embodiment, the CD19 binding domain comprises a light chain variable region described herein (e.g., in Table 14 or 17) and/or a heavy chain variable region described herein (e.g., in Table 14 or 17). In one embodiment, the CD19 binding domain is a scFv comprising a light chain and a heavy chain of an amino acid sequence listed in Table 14 or 17. In an embodiment, the CD19 binding domain (e.g., an scFv) comprises: a light chain variable region comprising an amino acid sequence having at least one, two or three modifications (e.g., substitutions, e.g., conservative substitutions) but not more than 30, 20 or 10 modifications (e.g., substitutions, e.g., conservative substitutions) of an amino acid sequence of a light chain variable region provided in Table 14 or 17, or a sequence with 95-99% identity with an amino acid sequence provided in Table 14 or 17; and/or a heavy chain variable region comprising an amino acid sequence having at least one, two or three modifications (e.g., substitutions, e.g., conservative substitutions) but not more than 30, 20 or 10 modifications (e.g., substitutions, e.g., conservative substitutions) of an amino acid sequence of a heavy chain variable region provided in Table 14 or 17, or a sequence with 95-99% identity to an amino acid sequence provided in Table 14 or 17.

[0884] In one embodiment, the CD19 binding domain comprises an amino acid sequence selected from a group consisting of SEQ ID NO: 7883; SEQ ID NO: 7884, SEQ ID NO: 7885; SEQ ID NO: 7886; SEQ ID NO: 7887; SEQ ID NO: 7888; SEQ ID NO: 7889, SEQ ID NO: 7890, SEQ ID NO: 7891, SEQ ID NO: 7892, SEQ ID NO: 7893, SEQ ID NO: 7894, SEQ ID NO: 7895, and SEQ ID NO: 7898; or an amino acid sequence having at least one, two or three modifications (e.g., substitutions, e.g., conservative substitutions) but not more than 30, 20 or 10 modifications (e.g., substitutions, e.g., conservative substitutions) to any of the aforesaid sequences; or a sequence with 95-99% identity to any of the aforesaid sequences. In one embodiment, the CD19 binding domain is a scFv, and a light chain variable region comprising an amino acid sequence described herein, e.g., in Table 14 or 17, is attached to a heavy chain variable region comprising an amino acid sequence described herein, e.g., in Table 14 or 17, via a linker, e.g., a linker described herein. In one embodiment, the CD19 binding domain includes a (Gly4-Ser)n linker, wherein n is 1, 2, 3, 4, 5, or 6, preferably 3 (SEQ ID NO: 10801). The light chain variable region and heavy chain variable region of a scFv can be, e.g., in any of the following orientations: light chain variable region-linker-heavy chain variable region or heavy chain variable region-linker-light chain variable region.

[0885] Any known CD19 CAR, e.g., the CD19 antigen binding domain of any known CD19 CAR, in the art can be used in accordance with the instant invention to construct a CAR. For example, LG-740; CD19 CAR described in the U.S. Pat. Nos. 8,399,645; 7,446,190; Xu et al., Leuk Lymphoma. 2013 54(2):255-260(2012); Cruz et al., Blood 122(17):2965-2973 (2013); Brentjens et al., Blood, 118(18):4817-4828 (2011); Kochenderfer et al., Blood 116(20):4099-102 (2010); Kochenderfer et al., Blood 122 (25):4129-39(2013); and 16th Annu Meet Am Soc Gen Cell Ther (ASGCT) (May 15-18, Salt Lake City) 2013, Abst 10. In one embodiment, an antigen binding domain against CD19 is an antigen binding portion, e.g., CDRs, of a CAR, antibody or antigen-binding fragment thereof described in, e.g., PCT publication WO2012/079000; PCT publication WO2014/153270; Kochenderfer, J. N. et al., J. Immunother. 32 (7), 689-702 (2009); Kochenderfer, J. N., et al., Blood, 116 (20), 4099-4102 (2010); PCT publication WO2014/031687; Bejcek, Cancer Research, 55, 2346-2351, 1995; or U.S. Pat. No. 7,446,190.

[0886] In an embodiment, the antigen-binding domain of CAR, e.g., a CAR expressed by a cell of the invention, binds to BCMA. BCMA is found preferentially expressed in mature B lymphocytes. In an embodiment, the antigen binding domain is a murine scFv domain that binds to human BCMA. In an embodiment, the antigen binding domain is a humanized antibody or antibody fragment, e.g., scFv domain, that binds human BCMA. In an embodiment, the antigen binding domain is a human antibody or antibody fragment that binds to human BCMA. Exemplary scFv domains (and their sequences, e.g., CDRs, VL and VH sequences) that bind to BCMA are provided in Table 18, Table 19, Table 20 and Table 21. The scFv domain sequences provided in Table 18 and Table 19 include a light chain variable region (VL) and a heavy chain variable region (VH). The VL and VH are attached by a linker, e.g., in the following orientation: VH-linker-VL.

TABLE 18
Antigen Binding domains that bind BCMA
The amino acid sequences variable heavy chain and variable light chain sequences
for each scFv is also provided.

| | | |
|---|---|---|
| | SEQ | |
| Name/ | ID | |
| Description | NO: | Sequence |

139109

| | | |
|---|---|---|
| 139109- aa | 7949 | EVQLVESGGGLVQPGGSLRLSCAVSGFALSNHGMSWVRRAPGKGLEWVSG |
| ScFv domain | | IVYSGSTYYAASVKGRFTISRDNSRNTLYLQMNSLRPEDTAIYYCSAHGG |
| | | ESDVWGQGTTVTVSSASGGGGSGGRASGGGGSDIQLTQSPSSLSASVGDR |
| | | VTITCRASQSISSYLNWYQQKPGKAPKLLIYAASSLQSGVPSRFSGSGSG |
| | | TDFTLTISSLQPEDFATYYCQQSYSTPYTFGQGTKVEIK |
| 139109- nt | 7964 | GAAGTGCAATTGGTGGAATCAGGGGGAGGACTTGTGCAGCCTGGAGGATC |
| ScFv domain | | GCTGAGACTGTCATGTGCCGTGTCCGGCTTTGCCCTGTCCAACCACGGGA |
| | | TGTCCTGGGTCCGCCGCGCGCCTGGAAAGGGCCTCGAATGGGTGTCGGGT |
| | | ATTGTGTACAGCGGTAGCACCTACTATGCCGCATCCGTGAAGGGGAGATT |
| | | CACCATCAGCCGGGACAACTCCAGGAACACTCTGTACCTCCAAATGAATT |
| | | CGCTGAGGCCAGAGGACACTGCCATCTACTACTGCTCCGCGCATGGCGGA |
| | | GAGTCCGACGTCTGGGGACAGGGGACCACCGTGACCGTGTCTAGCGCGTC |
| | | CGGCGGAGGCGGCAGCGGGGGTCGGGCATCAGGGGGCGGCGGATCGGACA |
| | | TCCAGCTCACCCAGTCCCCGAGCTCGCTGTCCGCCTCCGTGGGAGATCGG |
| | | GTCACCATCACGTGCCGCGCCAGCCAGTCGATTTCCTCCTACCTGAACTG |
| | | GTACCAACAGAAGCCCGGAAAAGCCCCGAAGCTTCTCATCTACGCCGCCT |
| | | CGAGCCTGCAGTCAGGAGTGCCCTCACGGTTCTCCGGCTCCGGTTCCGGT |
| | | ACTGATTTCACCCTGACCATTTCCTCCCTGCAACCGGAGGACTTCGCTAC |
| | | TTACTACTGCCAGCAGTCGTACTCCACCCCCTACACTTTCGGACAAGGCA |
| | | CCAAGGTCGAAATCAAG |
| 139109- aa | 7979 | EVQLVESGGGLVQPGGSLRLSCAVSGFALSNHGMSWVRRAPGKGLEWVSG |
| VH | | IVYSGSTYYAASVKGRFTISRDNSRNTLYLQMNSLRPEDTAIYYCSAHGG |
| | | ESDVWGQGTTVTVSS |
| 139109- aa | 7994 | DIQLTQSPSSLSASVGDRVTITCRASQSISSYLNWYQQKPGKAPKLLIYA |
| VL | | ASSLQSGVPSRFSGSGSGTDFTLTISSLQPEDFATYYCQQSYSTPYTFGQ |
| | | GTKVEIK |

139103

| | | |
|---|---|---|
| 139103- aa | 7939 | QVQLVESGGGLVQPGRSLRLSCAASGFTFSNYAMSWVRQAPGKGLGWVSG |
| ScFv domain | | ISRSGENTYYADSVKGRFTISRDNSKNTLYLQMNSLRDEDTAVYYCARSP |
| | | AHYYGGMDVWGQGTTVTVSSASGGGGSGGRASGGGGSDIVLTQSPGTLSL |
| | | SPGERATLSCRASQSISSSFLAWYQQKPGQAPRLLIYGASRRATGIPDRF |
| | | SGSGSGTDFTLTISRLEPEDSAVYYCQQYHSSPSWTFGQGTKLEIK |
| 139103- nt | 7954 | CAAGTGCAACTCGTGGAATCTGGTGGAGGACTCGTGCAACCCGGAAGATC |
| ScFv domain | | GCTTAGACTGTCGTGTGCCGCCAGCGGGTTCACTTTCTCGAACTACGCGA |
| | | TGTCCTGGGTCCGCCAGGCACCCGGAAAGGGACTCGGTTGGGTGTCCGGC |
| | | ATTTCCCGGTCCGGCGAAAATACCTACTACGCCGACTCCGTGAAGGGCCG |
| | | CTTCACCATCTCAAGGGACAACAGCAAAAACACCCTGTACTTGCAAATGA |
| | | ACTCCCTGCGGGATGAAGATACAGCCGTGTACTATTGCGCCCGGTCGCCT |
| | | GCCCATTACTACGGCGGAATGGACGTCTGGGGACAGGGAACCACTGTGAC |
| | | TGTCAGCAGCGCGTCGGGTGGCGGCGGCTCAGGGGGTCGGGCCTCCGGGG |
| | | GGGGAGGGTCCGACATCGTGCTGACCCAGTCCCCGGGAACCCTGAGCCTG |
| | | AGCCCGGGAGAGCGCGCGACCCTGTCATGCCGGGCATCCCAGAGCATTAG |
| | | CTCCTCCTTTCTCGCCTGGTATCAGCAGAAGCCCGGACAGGCCCCGAGGC |
| | | TGCTGATCTACGGCGCTAGCAGAAGGGCTACCGGAATCCCAGACCGGTTC |
| | | TCCGGCTCCGGTTCCGGGACCGATTTCACCCTTACTATCTCGCGCCTGGA |
| | | ACCTGAGGACTCCGCCGTCTACTACTGCCAGCAGTACCACTCATCCCCGT |
| | | CGTGGACGTTCGGACAGGGCACCAAGCTGGAGATTAAG |
| 139103- aa | 7969 | QVQLVESGGGLVQPGRSLRLSCAASGFTFSNYAMSWVRQAPGKGLGWVSG |
| VH | | ISRSGENTYYADSVKGRFTISRDNSKNTLYLQMNSLRDEDTAVYYCARSP |
| | | AHYYGGMDVWGQGTTVTVSS |
| 139103- aa | 7984 | DIVLTQSPGTLSLSPGERATLSCRASQSISSSFLAWYQQKPGQAPRLLIY |
| VL | | GASRRATGIPDRESGSGSGTDETLTISRLEPEDSAVYYCQQYHSSPSWTF |
| | | GQGTKLEIK |

139105

| | | |
|---|---|---|
| 139105- aa | 7940 | QVQLVESGGGLVQPGRSLRLSCAASGFTFDDYAMHWVRQAPGKGLEWVSG |
| ScFv domain | | ISWNSGSIGYADSVKGRFTISRDNAKNSLYLQMNSLRAEDTALYYCSVHS |
| | | FLAYWGQGTLVTVSSASGGGGSGGRASGGGGSDIVMTQTPLSLPVTPGEP |
| | | ASISCRSSQSLLHSNGYNYLDWYLQKPGQSPQLLIYLGSNRASGVPDRFS |
| | | GSGSGTDFTLKISRVEAEDVGVYYCMQALQTPYTFGQGTKVEIK |
| 139105- nt | 7955 | CAAGTGCAACTCGTCGAATCCGGTGGAGGTCTGGTCCAACCTGGTAGAAG |
| ScFv domain | | CCTGAGACTGTCGTGTGCGGCCAGCGGATTCACCTTTGATGACTATGCTA |
| | | TGCACTGGGTGCGGCAGGCCCCAGGAAAGGGCCTGGAATGGGTGTCGGGA |
| | | ATTAGCTGGAACTCCGGGTCCATTGGCTACGCCGACTCCGTGAAGGGCCG |
| | | CTTCACCATCTCCCGCGACAACGCAAAGAACTCCCTGTACTTGCAAATGA |
| | | ACTCGCTCAGGGCTGAGGATACCGCGCTGTACTACTGCTCCGTGCATTCC |
| | | TTCCTGGCCTACTGGGGACAGGGAACTCTGGTCACCGTGTCGAGCGCCTC |
| | | CGGCGGCGGGGGCTCGGGTGGACGGGCCTCGGGCGGAGGGGGGTCCGACA |
| | | TCGTGATGACCCAGACCCCGCTGAGCTTGCCCGTGACTCCCGGAGAGCCT |
| | | GCATCCATCTCCTGCCGGTCATCCCAGTCCCTTCTCCACTCCAACGGATA |
| | | CAACTACCTCGACTGGTACCTCCAGAAGCCGGGACAGAGCCCTCAGCTTC |
| | | TGATCTACCTGGGGTCAAATAGAGCCTCAGGAGTGCCGGATCGGTTCAGC |
| | | GGATCTGGTTCGGGAACTGATTTCACTCTGAAGATTTCCCGCGTGGAAGC |
| | | CGAGGACGTGGGCGTCTACTACTGTATGCAGGCGCTGCAGACCCCCTATA |
| | | CCTTCGGCCAAGGGACGAAAGTGGAGATCAAG |
| 139105- aa | 7970 | QVQLVESGGGLVQPGRSLRLSCAASGFTFDDYAMHWVRQAPGKGLEWVSG |
| VH | | ISWNSGSIGYADSVKGRFTISRDNAKNSLYLQMNSLRAEDTALYYCSVHS |
| | | FLAYWGQGTLVTVSS |
| 139105- aa | 7985 | DIVMTQTPLSLPVTPGEPASISCRSSQSLLHSNGYNYLDWYLQKPGQSPQ |
| VL | | LLIYLGSNRASGVPDRFSGSGSGTDFTLKISRVEAEDVGVYYCMQALQTP |
| | | YTFGQGTKVEIK |

139111

| | | |
|---|---|---|
| 139111- aa | 7941 | EVQLLESGGGLVQPGGSLRLSCAVSGFALSNHGMSWVRRAPGKGLEWVSG |
| ScFv domain | | IVYSGSTYYAASVKGRFTISRDNSRNTLYLQMNSLRPEDTAIYYCSAHGG |
| | | ESDVWGQGTTVTVSSASGGGGSGGRASGGGGSDIVMTQTPLSLSVTPGQP |
| | | ASISCKSSQSLLRNDGKTPLYWYLQKAGQPPQLLIYEVSNRFSGVPDRFS |
| | | GSGSGTDFTLKISRVEAEDVGAYYCMQNIQFPSFGGGTKLEIK |
| 139111- nt | 7956 | GAAGTGCAATTGTTGGAATCTGGAGGAGGACTTGTGCAGCCTGGAGGATC |
| ScFv domain | | ACTGAGACTTTCGTGTGCGGTGTCAGGCTTCGCCCTGAGCAACCACGGCA |
| | | TGAGCTGGGTGCGGAGAGCCCCGGGGAAGGGTCTGGAATGGGTGTCCGGG |
| | | ATCGTCTACTCCGGTTCAACTTACTACGCCGCAAGCGTGAAGGGTCGCTT |
| | | CACCATTTCCCGCGATAACTCCCGGAACACCCTGTACCTCCAAATGAACT |
| | | CCCTGCGGCCCGAGGACACCGCCATCTACTACTGTTCCGCGCATGGAGGA |
| | | GAGTCCGATGTCTGGGGACAGGGCACTACCGTGACCGTGTCGAGCGCCTC |
| | | GGGGGGAGGAGGCTCCGGCGGTCGCGCCTCCGGGGGGGGTGGCAGCGACA |
| | | TTGTGATGACGCAGACTCCACTCTCGCTGTCCGTGACCCCGGGACAGCCC |
| | | GCGTCCATCTCGTGCAAGAGCTCCCAGAGCCTGCTGAGGAACGACGGAAA |
| | | GACTCCTCTGTATTGGTACCTCCAGAAGGCTGGACAGCCCCCGCAACTGC |
| | | TCATCTACGAAGTGTCAAATCGCTTCTCCGGGGTGCCGGATCGGTTTTCC |
| | | GGCTCGGGATCGGGCACCGACTTCACCCTGAAAATCTCCAGGGTCGAGGC |
| | | CGAGGACGTGGGAGCCTACTACTGCATGCAAAACATCCAGTTCCCTTCCT |
| | | TCGGCGGCGGCACAAAGCTGGAGATTAAG |
| 139111- aa | 7971 | EVQLLESGGGLVQPGGSLRLSCAVSGFALSNHGMSWVRRAPGKGLEWVSG |
| VH | | IVYSGSTYYAASVKGRFTISRDNSRNTLYLQMNSLRPEDTAIYYCSAHGG |
| | | ESDVWGQGTTVTVSS |
| 139111- aa | 7986 | DIVMTQTPLSLSVTPGQPASISCKSSQSLLRNDGKTPLYWYLQKAGQPPQ |
| VL | | LLIYEVSNRFSGVPDRFSGSGSGTDFTLKISRVEAEDVGAYYCMQNIQFP |
| | | SFGGGTKLEIK |

139100

| | | |
|---|---|---|
| 139100- aa | 7942 | QVQLVQSGAEVRKTGASVKVSCKASGYIFDNFGINWVRQAPGQGLEWMGW |
| ScFv domain | | INPKNNNTNYAQKFQGRVTITADESTNTAYMEVSSLRSEDTAVYYCARGP |
| | | YYYQSYMDVWGQGTMVTVSSASGGGGSGGRASGGGGSDIVMTQTPLSLPV |
| | | TPGEPASISCRSSQSLLHSNGYNYLNWYLQKPGQSPQLLIYLGSKRASGV |
| | | PDRFSGSGSGTDFTLHITRVGAEDVGVYYCMQALQTPYTFGQGTKLEIK |
| 139100- nt | 7957 | CAAGTCCAACTCGTCCAGTCCGGCGCAGAAGTCAGAAAAACCGGTGCTAG |
| ScFv domain | | CGTGAAAGTGTCCTGCAAGGCCTCCGGCTACATTTTCGATAACTTCGGAA |
| | | TCAACTGGGTCAGACAGGCCCCGGGCCAGGGGCTGGAATGGATGGGATGG |
| | | ATCAACCCCAAGAACAACAACACCAACTACGCACAGAAGTTCCAGGGCCG |
| | | CGTGACTATCACCGCCGATGAATCGACCAATACCGCCTACATGGAGGTGT |
| | | CCTCCCTGCGGTCGGAGGACACTGCCGTGTATTACTGCGCGAGGGGCCCA |
| | | TACTACTACCAAAGCTACATGGACGTCTGGGGACAGGGAACCATGGTGAC |
| | | CGTGTCATCCGCCTCCGGTGGTGGAGGCTCCGGGGGGCGGGCTTCAGGAG |
| | | GCGGAGGAAGCGATATTGTGATGACCCAGACTCCGCTTAGCCTGCCCGTG |
| | | ACTCCTGGAGAACCGGCCTCCATTTCCTGCCGGTCCTCGCAATCACTCCT |
| | | GCATTCCAACGGTTACAACTACCTGAATTGGTACCTCCAGAAGCCTGGCC |
| | | AGTCGCCCCAGTTGCTGATCTATCTGGGCTCGAAGCGCGCCTCCGGGGTG |
| | | CCTGACCGGTTTAGCGGATCTGGGAGCGGCACGGACTTCACTCTCCACAT |
| | | CACCCGCGTGGGAGCGGAGGACGTGGGAGTGTACTACTGTATGCAGGCGC |
| | | TGCAGACTCCGTACACATTCGGACAGGGCACCAAGCTGGAGATCAAG |
| 139100- aa | 7972 | QVQLVQSGAEVRKTGASVKVSCKASGYIFDNFGINWVRQAPGQGLEWMGW |
| VH | | INPKNNNTNYAQKFQGRVTITADESTNTAYMEVSSLRSEDTAVYYCARGP |
| | | YYYQSYMDVWGQGTMVTVSS |
| 139100- aa | 7987 | DIVMTQTPLSLPVTPGEPASISCRSSQSLLHSNGYNYLNWYLQKPGQSPQ |
| VL | | LLIYLGSKRASGVPDRFSGSGSGTDFTLHITRVGAEDVGVYYCMQALQTP |
| | | YTFGQGTKLEIK |

139101

| | | |
|---|---|---|
| 139101- aa | 7943 | QVQLQESGGGLVQPGGSLRLSCAASGFTFSSDAMTWVRQAPGKGLEWVSV |
| ScFv domain | | ISGSGGTTYYADSVKGRFTISRDNSKNTLYLQMNSLRAEDTAVYYCAKLD |
| | | SSGYYYARGPRYWGQGTLVTVSSASGGGGSGGRASGGGGSDIQLTQSPSS |
| | | LSASVGDRVTITCRASQSISSYLNWYQQKPGKAPKLLIYGASTLASGVPA |
| | | RFSGSGSGTHFTLTINSLQSEDSATYYCQQSYKRASFGQGTKVEIK |
| 139101- nt | 7958 | CAAGTGCAACTTCAAGAATCAGGCGGAGGACTCGTGCAGCCCGGAGGATC |
| ScFv domain | | ATTGCGGCTCTCGTGCGCCGCCTCGGGCTTCACCTTCTCGAGCGACGCCA |
| | | TGACCTGGGTCCGCCAGGCCCCGGGGAAGGGGCTGGAATGGGTGTCTGTG |
| | | ATTTCCGGCTCCGGGGGAACTACGTACTACGCCGATTCCGTGAAAGGTCG |
| | | CTTCACTATCTCCCGGGACAACAGCAAGAACACCCTTTATCTGCAAATGA |
| | | ATTCCCTCCGCGCCGAGGACACCGCCGTGTACTACTGCGCCAAGCTGGAC |
| | | TCCTCGGGCTACTACTATGCCCGGGGTCCGAGATACTGGGGACAGGGAAC |
| | | CCTCGTGACCGTGTCCTCCGCGTCCGGCGGAGGAGGGTCGGGAGGGCGGG |
| | | CCTCCGGCGGCGGCGGTTCGGACATCCAGCTGACCCAGTCCCCATCCTCA |
| | | CTGAGCGCAAGCGTGGGCGACAGAGTCACCATTACATGCAGGGCGTCCCA |
| | | GAGCATCAGCTCCTACCTGAACTGGTACCAACAGAAGCCTGGAAAGGCTC |
| | | CTAAGCTGTTGATCTACGGGGCTTCGACCCTGGCATCCGGGGTGCCCGCG |
| | | AGGTTTAGCGGAAGCGGTAGCGGCACTCACTTCACTCTGACCATTAACAG |
| | | CCTCCAGTCCGAGGATTCAGCCACTTACTACTGTCAGCAGTCCTACAAGC |
| | | GGGCCAGCTTCGGACAGGGCACTAAGGTCGAGATCAAG |
| 139101- aa | 7973 | QVQLQESGGGLVQPGGSLRLSCAASGFTFSSDAMTWVRQAPGKGLEWVSV |
| VH | | ISGSGGTTYYADSVKGRFTISRDNSKNTLYLQMNSLRAEDTAVYYCAKLD |
| | | SSGYYYARGPRYWGQGTLVTVSS |
| 139101- aa | 7988 | DIQLTQSPSSLSASVGDRVTITCRASQSISSYLNWYQQKPGKAPKLLIYG |
| VL | | ASTLASGVPARFSGSGSGTHFTLTINSLQSEDSATYYCQQSYKRASFGQG |
| | | TKVEIK |

139102

| | | |
|---|---|---|
| 139102- aa | 7944 | QVQLVQSGAEVKKPGASVKVSCKASGYTFSNYGITWVRQAPGQGLEWMGW |
| ScFv domain | | ISAYNGNTNYAQKFQGRVTMTRNTSISTAYMELSSLRSEDTAVYYCARGP |
| | | YYYYMDVWGKGTMVTVSSASGGGGSGGRASGGGGSEIVMTQSPLSLPVTP |
| | | GEPASISCRSSQSLLYSNGYNYVDWYLQKPGQSPQLLIYLGSNRASGVPD |
| | | RFSGSGSGTDFKLQISRVEAEDVGIYYCMQGRQFPYSFGQGTKVEIK |
| 139102- nt | 7959 | CAAGTCCAACTGGTCCAGAGCGGTGCAGAAGTGAAGAAGCCCGGAGCGAG |
| ScFv domain | | CGTGAAAGTGTCCTGCAAGGCTTCCGGGTACACCTTCTCCAACTACGGCA |
| | | TCACTTGGGTGCGCCAGGCCCCGGGACAGGGCCTGGAATGGATGGGGTGG |
| | | ATTTCCGCGTACAACGGCAATACGAACTACGCTCAGAAGTTCCAGGGTAG |
| | | AGTGACCATGACTAGGAACACCTCCATTTCCACCGCCTACATGGAACTGT |
| | | CCTCCCTGCGGAGCGAGGACACCGCCGTGTACTATTGCGCCCGGGGACCA |
| | | TACTACTACTACATGGATGTCTGGGGGAAGGGGACTATGGTCACCGTGTC |
| | | ATCCGCCTCGGGAGGCGGCGGATCAGGAGGACGCGCCTCTGGTGGTGGAG |
| | | GATCGGAGATCGTGATGACCCAGAGCCCTCTCTCCTTGCCCGTGACTCCT |
| | | GGGGAGCCCGCATCCATTTCATGCCGGAGCTCCCAGTCACTTCTCTACTC |
| | | CAACGGCTATAACTACGTGGATTGGTACCTCCAAAAGCCGGGCCAGAGCC |
| | | CGCAGCTGCTGATCTACCTGGGCTCGAACAGGGCCAGCGGAGTGCCTGAC |
| | | CGGTTCTCCGGGTCGGGAAGCGGGACCGACTTCAAGCTGCAAATCTCGAG |
| | | AGTGGAGGCCGAGGACGTGGGAATCTACTACTGTATGCAGGGCCGCCAGT |
| | | TTCCGTACTCGTTCGGACAGGGCACCAAAGTGGAAATCAAG |
| 139102- aa | 7974 | QVQLVQSGAEVKKPGASVKVSCKASGYTFSNYGITWVRQAPGQGLEWMGW |
| VH | | ISAYNGNTNYAQKFQGRVTMTRNTSISTAYMELSSLRSEDTAVYYCARGP |
| | | YYYYMDVWGKGTMVTVSS |
| 139102- aa | 7989 | EIVMTQSPLSLPVTPGEPASISCRSSQSLLYSNGYNYVDWYLQKPGQSPQ |
| VL | | LLIYLGSNRASGVPDRFSGSGSGTDEKLQISRVEAEDVGIYYCMQGRQFP |
| | | YSFGQGTKVEIK |

139104

| | | |
|---|---|---|
| 139104- aa | 7945 | EVQLLETGGGLVQPGGSLRLSCAVSGFALSNHGMSWVRRAPGKGLEWVSG |
| ScFv domain | | IVYSGSTYYAASVKGRFTISRDNSRNTLYLQMNSLRPEDTAIYYCSAHGG |
| | | ESDVWGQGTTVTVSSASGGGGSGGRASGGGGSEIVLTQSPATLSVSPGES |
| | | ATLSCRASQSVSSNLAWYQQKPGQAPRLLIYGASTRASGIPDRFSGSGSG |
| | | TDFTLTISSLQAEDVAVYYCQQYGSSLTFGGGTKVEIK |
| 139104- nt | 7960 | GAAGTGCAATTGCTCGAAACTGGAGGAGGTCTGGTGCAACCTGGAGGATC |
| ScFv domain | | ACTTCGCCTGTCCTGCGCCGTGTCGGGCTTTGCCCTGTCCAACCATGGAA |
| | | TGAGCTGGGTCCGCCGCGCGCCGGGGAAGGGCCTCGAATGGGTGTCCGGC |
| | | ATCGTCTACTCCGGCTCCACCTACTACGCCGCGTCCGTGAAGGGCCGGTT |
| | | CACGATTTCACGGGACAACTCGCGGAACACCCTGTACCTCCAAATGAATT |
| | | CCCTTCGGCCGGAGGATACTGCCATCTACTACTGCTCCGCCCACGGTGGC |
| | | GAATCCGACGTCTGGGGCCAGGGAACCACCGTGACCGTGTCCAGCGCGTC |
| | | CGGGGGAGGAGGAAGCGGGGGTAGAGCATCGGGTGGAGGCGGATCAGAGA |
| | | TCGTGCTGACCCAGTCCCCCGCCACCTTGAGCGTGTCACCAGGAGAGTCC |
| | | GCCACCCTGTCATGCCGCGCCAGCCAGTCCGTGTCCTCCAACCTGGCTTG |
| | | GTACCAGCAGAAGCCGGGGCAGGCCCCTAGACTCCTGATCTATGGGGCGT |
| | | CGACCCGGGCATCTGGAATTCCCGATAGGTTCAGCGGATCGGGCTCGGGC |
| | | ACTGACTTCACTCTGACCATCTCCTCGCTGCAAGCCGAGGACGTGGCTGT |
| | | GTACTACTGTCAGCAGTACGGAAGCTCCCTGACTTTCGGTGGCGGGACCA |
| | | AAGTCGAGATTAAG |
| 139104- aa | 7975 | EVQLLETGGGLVQPGGSLRLSCAVSGFALSNHGMSWVRRAPGKGLEWVSG |
| VH | | IVYSGSTYYAASVKGRFTISRDNSRNTLYLQMNSLRPEDTAIYYCSAHGG |
| | | ESDVWGQGTTVTVSS |
| 139104- aa | 7990 | EIVLTQSPATLSVSPGESATLSCRASQSVSSNLAWYQQKPGQAPRLLIYG |
| VL | | ASTRASGIPDRFSGSGSGTDFTLTISSLQAEDVAVYYCQQYGSSLTFGGG |
| | | TKVEIK |

139106

| | | |
|---|---|---|
| 139106- aa | 7946 | EVQLVETGGGLVQPGGSLRLSCAVSGFALSNHGMSWVRRAPGKGLEWVSG |
| ScFv domain | | IVYSGSTYYAASVKGRFTISRDNSRNTLYLQMNSLRPEDTAIYYCSAHGG |
| | | ESDVWGQGTTVTVSSASGGGGSGGRASGGGGSEIVMTQSPATLSVSPGER |
| | | ATLSCRASQSVSSKLAWYQQKPGQAPRLLMYGASIRATGIPDRFSGSGSG |
| | | TEFTLTISSLEPEDFAVYYCQQYGSSSWTFGQGTKVEIK |
| 139106- nt | 7961 | GAAGTGCAATTGGTGGAAACTGGAGGAGGACTTGTGCAACCTGGAGGATC |
| ScFv domain | | ATTGAGACTGAGCTGCGCAGTGTCGGGATTCGCCCTGAGCAACCATGGAA |
| | | TGTCCTGGGTCAGAAGGGCCCCTGGAAAAGGCCTCGAATGGGTGTCAGGG |
| | | ATCGTGTACTCCGGTTCCACTTACTACGCCGCCTCCGTGAAGGGGCGCTT |
| | | CACTATCTCACGGGATAACTCCCGCAATACCCTGTACCTCCAAATGAACA |
| | | GCCTGCGGCCGGAGGATACCGCCATCTACTACTGTTCCGCCCACGGTGGA |
| | | GAGTCTGACGTCTGGGGCCAGGGAACTACCGTGACCGTGTCCTCCGCGTC |
| | | CGGCGGTGGAGGGAGCGGCGGCCGCGCCAGCGGCGGCGGAGGCTCCGAGA |
| | | TCGTGATGACCCAGAGCCCCGCTACTCTGTCGGTGTCGCCCGGAGAAAGG |
| | | GCGACCCTGTCCTGCCGGGCGTCGCAGTCCGTGAGCAGCAAGCTGGCTTG |
| | | GTACCAGCAGAAGCCGGGCCAGGCACCACGCCTGCTTATGTACGGTGCCT |
| | | CCATTCGGGCCACCGGAATCCCGGACCGGTTCTCGGGGTCGGGGTCCGGT |
| | | ACCGAGTTCACACTGACCATTTCCTCGCTCGAGCCCGAGGACTTTGCCGT |
| | | CTATTACTGCCAGCAGTACGGCTCCTCCTCATGGACGTTCGGCCAGGGGA |
| | | CCAAGGTCGAAATCAAG |
| 139106- aa | 7976 | EVQLVETGGGLVQPGGSLRLSCAVSGFALSNHGMSWVRRAPGKGLEWVSG |
| VH | | IVYSGSTYYAASVKGRFTISRDNSRNTLYLQMNSLRPEDTAIYYCSAHGG |
| | | ESDVWGQGTTVTVSS |
| 139106- aa | 7991 | EIVMTQSPATLSVSPGERATLSCRASQSVSSKLAWYQQKPGQAPRLLMYG |
| VL | | ASIRATGIPDRFSGSGSGTEFTLTISSLEPEDFAVYYCQQYGSSSWTFGQ |
| | | GTKVEIK |

139107

| | | |
|---|---|---|
| 139107- aa | 7947 | EVQLVETGGGVVQPGGSLRLSCAVSGFALSNHGMSWVRRAPGKGLEWVSG |
| ScFv domain | | IVYSGSTYYAASVKGRFTISRDNSRNTLYLQMNSLRPEDTAIYYCSAHGG |
| | | ESDVWGQGTTVTVSSASGGGGSGGRASGGGGSEIVLTQSPGTLSLSPGER |
| | | ATLSCRASQSVGSTNLAWYQQKPGQAPRLLIYDASNRATGIPDRFSGGGS |
| | | GTDFTLTISRLEPEDFAVYYCQQYGSSPPWTFGQGTKVEIK |
| 139107- nt | 7962 | GAAGTGCAATTGGTGGAGACTGGAGGAGGAGTGGTGCAACCTGGAGGAAG |
| ScFv domain | | CCTGAGACTGTCATGCGCGGTGTCGGGCTTCGCCCTCTCCAACCACGGAA |
| | | TGTCCTGGGTCCGCCGGGCCCCTGGGAAAGGACTTGAATGGGTGTCCGGC |
| | | ATCGTGTACTCGGGTTCCACCTACTACGCGGCCTCAGTGAAGGGCCGGTT |
| | | TACTATTAGCCGCGACAACTCCAGAAACACACTGTACCTCCAAATGAACT |
| | | CGCTGCGGCCGGAAGATACCGCTATCTACTACTGCTCCGCCCATGGGGGA |
| | | GAGTCGGACGTCTGGGGACAGGGCACCACTGTCACTGTGTCCAGCGCTTC |
| | | CGGCGGTGGTGGAAGCGGGGGACGGGCCTCAGGAGGCGGTGGCAGCGAGA |
| | | TTGTGCTGACCCAGTCCCCCGGGACCCTGAGCCTGTCCCCGGGAGAAAGG |
| | | GCCACCCTCTCCTGTCGGGCATCCCAGTCCGTGGGGTCTACTAACCTTGC |
| | | ATGGTACCAGCAGAAGCCCGGCCAGGCCCCTCGCCTGCTGATCTACGACG |
| | | CGTCCAATAGAGCCACCGGCATCCCGGATCGCTTCAGCGGAGGCGGATCG |
| | | GGCACCGACTTCACCCTCACCATTTCAAGGCTGGAACCGGAGGACTTCGC |
| | | CGTGTACTACTGCCAGCAGTATGGTTCGTCCCCACCCTGGACGTTCGGCC |
| | | AGGGGACTAAGGTCGAGATCAAG |
| 139107- aa | 7977 | EVQLVETGGGVVQPGGSLRLSCAVSGFALSNHGMSWVRRAPGKGLEWVSG |
| VH | | IVYSGSTYYAASVKGRFTISRDNSRNTLYLQMNSLRPEDTAIYYCSAHGG |
| | | ESDVWGQGTTVTVSS |
| 139107- aa | 7992 | EIVLTQSPGTLSLSPGERATLSCRASQSVGSTNLAWYQQKPGQAPRLLIY |
| VL | | DASNRATGIPDRFSGGGSGTDFTLTISRLEPEDFAVYYCQQYGSSPPWTF |
| | | GQGTKVEIK |

139108

| | | |
|---|---|---|
| 139108- aa | 7948 | QVQLVESGGGLVKPGGSLRLSCAASGFTFSDYYMSWIRQAPGKGLEWVSY |
| ScFv domain | | ISSSGSTIYYADSVKGRFTISRDNAKNSLYLQMNSLRAEDTAVYYCARES |
| | | GDGMDVWGQGTTVTVSSASGGGGSGGRASGGGGSDIQMTQSPSSLSASVG |
| | | DRVTITCRASQSISSYLNWYQQKPGKAPKLLIYAASSLQSGVPSRFSGSG |
| | | SGTDFTLTISSLQPEDFATYYCQQSYTLAFGQGTKVDIK |
| 139108- nt | 7963 | CAAGTGCAACTCGTGGAATCTGGTGGAGGACTCGTGAAACCTGGAGGATC |
| ScFv domain | | ATTGAGACTGTCATGCGCGGCCTCGGGATTCACGTTCTCCGATTACTACA |
| | | TGAGCTGGATTCGCCAGGCTCCGGGGAAGGGACTGGAATGGGTGTCCTAC |
| | | ATTTCCTCATCCGGCTCCACCATCTACTACGCGGACTCCGTGAAGGGGAG |
| | | ATTCACCATTAGCCGCGATAACGCCAAGAACAGCCTGTACCTTCAGATGA |
| | | ACTCCCTGCGGGCTGAAGATACTGCCGTCTACTACTGCGCAAGGGAGAGC |
| | | GGAGATGGGATGGACGTCTGGGGACAGGGTACCACTGTGACCGTGTCGTC |
| | | GGCCTCCGGCGGAGGGGGTTCGGGTGGAAGGGCCAGCGGCGGCGGAGGCA |
| | | GCGACATCCAGATGACCCAGTCCCCCTCATCGCTGTCCGCCTCCGTGGGC |
| | | GACCGCGTCACCATCACATGCCGGGCCTCACAGTCGATCTCCTCCTACCT |
| | | CAATTGGTATCAGCAGAAGCCCGGAAAGGCCCCTAAGCTTCTGATCTACG |
| | | CAGCGTCCTCCCTGCAATCCGGGGTCCCATCTCGGTTCTCCGGCTCGGGC |
| | | AGCGGTACCGACTTCACTCTGACCATCTCGAGCCTGCAGCCGGAGGACTT |
| | | CGCCACTTACTACTGTCAGCAAAGCTACACCCTCGCGTTTGGCCAGGGCA |
| | | CCAAAGTGGACATCAAG |
| 139108- aa | 7978 | QVQLVESGGGLVKPGGSLRLSCAASGFTFSDYYMSWIRQAPGKGLEWVSY |
| VH | | ISSSGSTIYYADSVKGRFTISRDNAKNSLYLQMNSLRAEDTAVYYCARES |
| | | GDGMDVWGQGTTVTVSS |
| 139108- aa | 7993 | DIQMTQSPSSLSASVGDRVTITCRASQSISSYLNWYQQKPGKAPKLLIYA |
| VL | | ASSLQSGVPSRFSGSGSGTDFTLTISSLQPEDFATYYCQQSYTLAFGQGT |
| | | KVDIK |

139110

| | | |
|---|---|---|
| 139110- aa | 7950 | QVQLVQSGGGLVKPGGSLRLSCAASGFTFSDYYMSWIRQAPGKGLEWVSY |
| ScFv domain | | ISSSGNTIYYADSVKGRFTISRDNAKNSLYLQMNSLRAEDTAVYYCARST |
| | | MVREDYWGQGTLVTVSSASGGGGSGGRASGGGGSDIVLTQSPLSLPVTLG |
| | | QPASISCKSSESLVHNSGKTYLNWFHQRPGQSPRRLIYEVSNRDSGVPDR |
| | | FTGSGSGTDFTLKISRVEAEDVGVYYCMQGTHWPGTFGQGTKLEIK |
| 139110- nt | 7965 | CAAGTGCAACTGGTGCAAAGCGGAGGAGGATTGGTCAAACCCGGAGGAAG |
| ScFv domain | | CCTGAGACTGTCATGCGCGGCCTCTGGATTCACCTTCTCCGATTACTACA |
| | | TGTCATGGATCAGACAGGCCCCGGGGAAGGGCCTCGAATGGGTGTCCTAC |
| | | ATCTCGTCCTCCGGGAACACCATCTACTACGCCGACAGCGTGAAGGGCCG |
| | | CTTTACCATTTCCCGCGACAACGCAAAGAACTCGCTGTACCTTCAGATGA |
| | | ATTCCCTGCGGGCTGAAGATACCGCGGTGTACTATTGCGCCCGGTCCACT |
| | | ATGGTCCGGGAGGACTACTGGGGACAGGGCACACTCGTGACCGTGTCCAG |
| | | CGCGAGCGGGGGTGGAGGCAGCGGTGGACGCGCCTCCGGCGGCGGCGGTT |
| | | CAGACATCGTGCTGACTCAGTCGCCCCTGTCGCTGCCGGTCACCCTGGGC |
| | | CAACCGGCCTCAATTAGCTGCAAGTCCTCGGAGAGCCTGGTGCACAACTC |
| | | AGGAAAGACTTACCTGAACTGGTTCCATCAGCGGCCTGGACAGTCCCCAC |
| | | GGAGGCTCATCTATGAAGTGTCCAACAGGGATTCGGGGGTGCCCGACCGC |
| | | TTCACTGGCTCCGGGTCCGGCACCGACTTCACCTTGAAAATCTCCAGAGT |
| | | GGAAGCCGAGGACGTGGGCGTGTACTACTGTATGCAGGGTACCCACTGGC |
| | | CTGGAACCTTTGGACAAGGAACTAAGCTCGAGATTAAG |
| 139110- aa | 7980 | QVQLVQSGGGLVKPGGSLRLSCAASGFTFSDYYMSWIRQAPGKGLEWVSY |
| VH | | ISSSGNTIYYADSVKGRFTISRDNAKNSLYLQMNSLRAEDTAVYYCARST |
| | | MVREDYWGQGTLVTVSS |
| 139110- aa | 7995 | DIVLTQSPLSLPVTLGQPASISCKSSESLVHNSGKTYLNWFHQRPGQSPR |
| VL | | RLIYEVSNRDSGVPDRFTGSGSGTDFTLKISRVEAEDVGVYYCMQGTHWP |
| | | GTFGQGTKLEIK |

139112

| | | |
|---|---|---|
| 139112- aa | 7951 | QVQLVESGGGLVQPGGSLRLSCAVSGFALSNHGMSWVRRAPGKGLEWVSG |
| ScFv domain | | IVYSGSTYYAASVKGRFTISRDNSRNTLYLQMNSLRPEDTAIYYCSAHGG |
| | | ESDVWGQGTTVTVSSASGGGGSGGRASGGGGSDIRLTQSPSPLSASVGDR |
| | | VTITCQASEDINKFLNWYHQTPGKAPKLLIYDASTLQTGVPSRFSGSGSG |
| | | TDFTLTINSLQPEDIGTYYCQQYESLPLTFGGGTKVEIK |
| 139112- nt | 7966 | CAAGTGCAACTCGTGGAATCTGGTGGAGGACTCGTGCAACCCGGTGGAAG |
| ScFv domain | | CCTTAGGCTGTCGTGCGCCGTCAGCGGGTTTGCTCTGAGCAACCATGGAA |
| | | TGTCCTGGGTCCGCCGGGCACCGGGAAAAGGGCTGGAATGGGTGTCCGGC |
| | | ATCGTGTACAGCGGGTCAACCTATTACGCCGCGTCCGTGAAGGGCAGATT |
| | | CACTATCTCAAGAGACAACAGCCGGAACACCCTGTACTTGCAAATGAATT |
| | | CCCTGCGCCCCGAGGACACCGCCATCTACTACTGCTCCGCCCACGGAGGA |
| | | GAGTCGGACGTGTGGGGCCAGGGAACGACTGTGACTGTGTCCAGCGCATC |
| | | AGGAGGGGGTGGTTCGGGCGGCCGGGCCTCGGGGGGAGGAGGTTCCGACA |
| | | TTCGGCTGACCCAGTCCCCGTCCCCACTGTCGGCCTCCGTCGGCGACCGC |
| | | GTGACCATCACTTGTCAGGCGTCCGAGGACATTAACAAGTTCCTGAACTG |
| | | GTACCACCAGACCCCTGGAAAGGCCCCCAAGCTGCTGATCTACGATGCCT |
| | | CGACCCTTCAAACTGGAGTGCCTAGCCGGTTCTCCGGGTCCGGCTCCGGC |
| | | ACTGATTTCACTCTGACCATCAACTCATTGCAGCCGGAAGATATCGGGAC |
| | | CTACTATTGCCAGCAGTACGAATCCCTCCCGCTCACATTCGGCGGGGGAA |
| | | CCAAGGTCGAGATTAAG |
| 139112- aa | 7981 | QVQLVESGGGLVQPGGSLRLSCAVSGFALSNHGMSWVRRAPGKGLEWVSG |
| VH | | IVYSGSTYYAASVKGRFTISRDNSRNTLYLQMNSLRPEDTAIYYCSAHGG |
| | | ESDVWGQGTTVTVSS |
| 139112- aa | 7996 | DIRLTQSPSPLSASVGDRVTITCQASEDINKFLNWYHQTPGKAPKLLIYD |
| VL | | ASTLQTGVPSRFSGSGSGTDFTLTINSLQPEDIGTYYCQQYESLPLTFGG |
| | | GTKVEIK |

139113

| | | |
|---|---|---|
| 139113- aa | 7952 | EVQLVETGGGLVQPGGSLRLSCAVSGFALSNHGMSWVRRAPGKGLEWVSG |
| ScFv domain | | IVYSGSTYYAASVKGRFTISRDNSRNTLYLQMNSLRPEDTAIYYCSAHGG |
| | | ESDVWGQGTTVTVSSASGGGGSGGRASGGGGSETTLTQSPATLSVSPGER |
| | | ATLSCRASQSVGSNLAWYQQKPGQGPRLLIYGASTRATGIPARFSGSGSG |
| | | TEFTLTISSLQPEDFAVYYCQQYNDWLPVTFGQGTKVEIK |
| 139113- nt | 7967 | GAAGTGCAATTGGTGGAAACTGGAGGAGGACTTGTGCAACCTGGAGGATC |
| ScFv domain | | ATTGCGGCTCTCATGCGCTGTCTCCGGCTTCGCCCTGTCAAATCACGGGA |
| | | TGTCGTGGGTCAGACGGGCCCCGGGAAAGGGTCTGGAATGGGTGTCGGGG |
| | | ATTGTGTACAGCGGCTCCACCTACTACGCCGCTTCGGTCAAGGGCCGCTT |
| | | CACTATTTCACGGGACAACAGCCGCAACACCCTCTATCTGCAAATGAACT |
| | | CTCTCCGCCCGGAGGATACCGCCATCTACTACTGCTCCGCACACGGCGGC |
| | | GAATCCGACGTGTGGGGACAGGGAACCACTGTCACCGTGTCGTCCGCATC |
| | | CGGTGGCGGAGGATCGGGTGGCCGGGCCTCCGGGGGCGGCGGCAGCGAGA |
| | | CTACCCTGACCCAGTCCCCTGCCACTCTGTCCGTGAGCCCGGGAGAGAGA |
| | | GCCACCCTTAGCTGCCGGGCCAGCCAGAGCGTGGGCTCCAACCTGGCCTG |
| | | GTACCAGCAGAAGCCAGGACAGGGTCCCAGGCTGCTGATCTACGGAGCCT |
| | | CCACTCGCGCGACCGGCATCCCCGCGAGGTTCTCCGGGTCGGGTTCCGGG |
| | | ACCGAGTTCACCCTGACCATCTCCTCCCTCCAACCGGAGGACTTCGCGGT |
| | | GTACTACTGTCAGCAGTACAACGATTGGCTGCCCGTGACATTTGGACAGG |
| | | GGACGAAGGTGGAAATCAAA |
| 139113- aa | 7982 | EVQLVETGGGLVQPGGSLRLSCAVSGFALSNHGMSWVRRAPGKGLEWVSG |
| VH | | IVYSGSTYYAASVKGRFTISRDNSRNTLYLQMNSLRPEDTAIYYCSAHGG |
| | | ESDVWGQGTTVTVSS |
| 139113- aa | 7997 | ETTLTQSPATLSVSPGERATLSCRASQSVGSNLAWYQQKPGQGPRLLIYG |
| VL | | ASTRATGIPARFSGSGSGTEFTLTISSLQPEDFAVYYCQQYNDWLPVTFG |
| | | QGTKVEIK |

139114

| | | |
|---|---|---|
| 139114- aa | 7953 | EVQLVESGGGLVQPGGSLRLSCAVSGFALSNHGMSWVRRAPGKGLEWVSG |
| ScFv domain | | IVYSGSTYYAASVKGRFTISRDNSRNTLYLQMNSLRPEDTAIYYCSAHGG |
| | | ESDVWGQGTTVTVSSASGGGGSGGRASGGGGSEIVLTQSPGTLSLSPGER |
| | | ATLSCRASQSIGSSSLAWYQQKPGQAPRLLMYGASSRASGIPDRFSGSGS |
| | | GTDFTLTISRLEPEDFAVYYCQQYAGSPPFTFGQGTKVEIK |
| 139114- nt | 7968 | GAAGTGCAATTGGTGGAATCTGGTGGAGGACTTGTGCAACCTGGAGGATC |
| ScFv domain | | ACTGAGACTGTCATGCGCGGTGTCCGGTTTTGCCCTGAGCAATCATGGGA |
| | | TGTCGTGGGTCCGGCGCGCCCCCGGAAAGGGTCTGGAATGGGTGTCGGGT |
| | | ATCGTCTACTCCGGGAGCACTTACTACGCCGCGAGCGTGAAGGGCCGCTT |
| | | CACCATTTCCCGCGATAACTCCCGCAACACCCTGTACTTGCAAATGAACT |
| | | CGCTCCGGCCTGAGGACACTGCCATCTACTACTGCTCCGCACACGGAGGA |
| | | GAATCCGACGTGTGGGGCCAGGGAACTACCGTGACCGTCAGCAGCGCCTC |
| | | CGGCGGCGGGGGCTCAGGCGGACGGGCTAGCGGCGGCGGTGGCTCCGAGA |
| | | TCGTGCTGACCCAGTCGCCTGGCACTCTCTCGCTGAGCCCCGGGGAAAGG |
| | | GCAACCCTGTCCTGTCGGGCCAGCCAGTCCATTGGATCATCCTCCCTCGC |
| | | CTGGTATCAGCAGAAACCGGGACAGGCTCCGCGGCTGCTTATGTATGGGG |
| | | CCAGCTCAAGAGCCTCCGGCATTCCCGACCGGTTCTCCGGGTCCGGTTCC |
| | | GGCACCGATTTCACCCTGACTATCTCGAGGCTGGAGCCAGAGGACTTCGC |
| | | CGTGTACTACTGCCAGCAGTACGCGGGGTCCCCGCCGTTCACGTTCGGAC |
| | | AGGGAACCAAGGTCGAGATCAAG |
| 139114- aa | 7983 | EVQLVESGGGLVQPGGSLRLSCAVSGFALSNHGMSWVRRAPGKGLEWVSG |
| VH | | IVYSGSTYYAASVKGRFTISRDNSRNTLYLQMNSLRPEDTAIYYCSAHGG |
| | | ESDVWGQGTTVTVSS |
| 139114- aa | 7998 | EIVLTQSPGTLSLSPGERATLSCRASQSIGSSSLAWYQQKPGQAPRLLMY |
| VL | | GASSRASGIPDRFSGSGSGTDFTLTISRLEPEDFAVYYCQQYAGSPPFTF |
| | | GQGTKVEIK |

149362

| | | |
|---|---|---|
| 149362-aa | 8029 | QVQLQESGPGLVKPSETLSLTCTVSGGSISSSYYYWGWIRQPPGKGLEWI |
| ScFv domain | | GSIYYSGSAYYNPSLKSRVTISVDTSKNQFSLRLSSVTAADTAVYYCARH |
| | | WQEWPDAFDIWGQGTMVTVSSGGGGSGGGGSGGGGSETTLTQSPAFMSAT |
| | | PGDKVIISCKASQDIDDAMNWYQQKPGEAPLFIIQSATSPVPGIPPRFSG |
| | | SGFGTDFSLTINNIESEDAAYYFCLQHDNFPLTFGQGTKLEIK |
| 149362-nt | 8050 | CAAGTGCAGCTTCAGGAAAGCGGACCGGGCCTGGTCAAGCCATCCGAAAC |
| ScFv domain | | TCTCTCCCTGACTTGCACTGTGTCTGGCGGTTCCATCTCATCGTCGTACT |
| | | ACTACTGGGGCTGGATTAGGCAGCCGCCCGGAAAGGGACTGGAGTGGATC |
| | | GGAAGCATCTACTATTCCGGCTCGGCGTACTACAACCCTAGCCTCAAGTC |
| | | GAGAGTGACCATCTCCGTGGATACCTCCAAGAACCAGTTTTCCCTGCGCC |
| | | TGAGCTCCGTGACCGCCGCTGACACCGCCGTGTACTACTGTGCTCGGCAT |
| | | TGGCAGGAATGGCCCGATGCCTTCGACATTTGGGGCCAGGGCACTATGGT |
| | | CACTGTGTCATCCGGGGGTGGAGGCAGCGGGGGAGGAGGGTCCGGGGGGG |
| | | GAGGTTCAGAGACAACCTTGACCCAGTCACCCGCATTCATGTCCGCCACT |
| | | CCGGGAGACAAGGTCATCATCTCGTGCAAAGCGTCCCAGGATATCGACGA |
| | | TGCCATGAATTGGTACCAGCAGAAGCCTGGCGAAGCGCCGCTGTTCATTA |
| | | TCCAATCCGCAACCTCGCCCGTGCCTGGAATCCCACCGCGGTTCAGCGGC |
| | | AGCGGTTTCGGAACCGACTTTTCCCTGACCATTAACAACATTGAGTCCGA |
| | | GGACGCCGCCTACTACTTCTGCCTGCAACACGACAACTTCCCTCTCACGT |
| | | TCGGCCAGGGAACCAAGCTGGAAATCAAG |
| 149362-aa VH | 8071 | QVQLQESGPGLVKPSETLSLTCTVSGGSISSSYYYWGWIRQPPGKGLEWI |
| | | GSIYYSGSAYYNPSLKSRVTISVDTSKNQFSLRLSSVTAADTAVYYCARH |
| | | WQEWPDAFDIWGQGTMVTVSS |
| 149362-aa VL | 8092 | ETTLTQSPAFMSATPGDKVIISCKASQDIDDAMNWYQQKPGEAPLFIIQS |
| | | ATSPVPGIPPRFSGSGFGTDESLTINNIESEDAAYYFCLQHDNEPLTFGQ |
| | | GTKLEIK |

149363

| | | |
|---|---|---|
| 149363-aa | 8030 | QVNLRESGPALVKPTQTLTLTCTFSGFSLRTSGMCVSWIRQPPGKALEWL |
| ScFv domain | | ARIDWDEDKFYSTSLKTRLTISKDTSDNQVVLRMTNMDPADTATYYCARS |
| | | GAGGTSATAFDIWGPGTMVTVSSGGGGSGGGGSGGGGSDIQMTQSPSSLS |
| | | ASVGDRVTITCRASQDIYNNLAWFQLKPGSAPRSLMYAANKSQSGVPSRF |
| | | SGSASGTDFTLTISSLQPEDFATYYCQHYYRFPYSFGQGTKLEIK |
| 149363-nt | 8051 | CAAGTCAATCTGCGCGAATCCGGCCCCGCCTTGGTCAAGCCTACCCAGAC |
| ScFv domain | | CCTCACTCTGACCTGTACTTTCTCCGGCTTCTCCCTGCGGACTTCCGGGA |
| | | TGTGCGTGTCCTGGATCAGACAGCCTCCGGGAAAGGCCCTGGAGTGGCTC |
| | | GCTCGCATTGACTGGGATGAGGACAAGTTCTACTCCACCTCACTCAAGAC |
| | | CAGGCTGACCATCAGCAAAGATACCTCTGACAACCAAGTGGTGCTCCGCA |
| | | TGACCAACATGGACCCAGCCGACACTGCCACTTACTACTGCGCGAGGAGC |
| | | GGAGCGGGCGGAACCTCCGCCACCGCCTTCGATATTTGGGGCCCGGGTAC |
| | | CATGGTCACCGTGTCAAGCGGAGGAGGGGGGTCCGGGGGCGGCGGTTCCG |
| | | GGGGAGGCGGATCGGACATTCAGATGACTCAGTCACCATCGTCCCTGAGC |
| | | GCTAGCGTGGGCGACAGAGTGACAATCACTTGCCGGGCATCCCAGGACAT |
| | | CTATAACAACCTTGCGTGGTTCCAGCTGAAGCCTGGTTCCGCACCGCGGT |
| | | CACTTATGTACGCCGCCAACAAGAGCCAGTCGGGAGTGCCGTCCCGGTTT |
| | | TCCGGTTCGGCCTCGGGAACTGACTTCACCCTGACGATCTCCAGCCTGCA |
| | | ACCCGAGGATTTCGCCACCTACTACTGCCAGCACTACTACCGCTTTCCCT |
| | | ACTCGTTCGGACAGGGAACCAAGCTGGAAATCAAG |
| 149363-aa VH | 8072 | QVNLRESGPALVKPTQTLTLTCTFSGFSLRTSGMCVSWIRQPPGKALEWL |
| | | ARIDWDEDKFYSTSLKTRLTISKDTSDNQVVLRMTNMDPADTATYYCARS |
| | | GAGGTSATAFDIWGPGTMVTVSS |
| 149363-aa VL | 8093 | DIQMTQSPSSLSASVGDRVTITCRASQDIYNNLAWFQLKPGSAPRSLMYA |
| | | ANKSQSGVPSRFSGSASGTDFTLTISSLQPEDFATYYCQHYYRFPYSFGQ |
| | | GTKLEIK |

149364

| | | |
|---|---|---|
| 149364-aa | 8031 | EVQLVESGGGLVKPGGSLRLSCAASGFTFSSYSMNWVRQAPGKGLEWVSS |
| ScFv domain | | ISSSSSYIYYADSVKGRFTISRDNAKNSLYLQMNSLRAEDTAVYYCAKTI |
| | | AAVYAFDIWGQGTTVTVSSGGGGSGGGGSGGGGSEIVLTQSPLSLPVTPE |
| | | EPASISCRSSQSLLHSNGYNYLDWYLQKPGQSPQLLIYLGSNRASGVPDR |
| | | FSGSGSGTDFTLKISRVEAEDVGVYYCMQALQTPYTFGQGTKLEIK |
| 149364-nt | 8052 | GAAGTGCAGCTTGTCGAATCCGGGGGGGGACTGGTCAAGCCGGGCGGATC |
| ScFv domain | | ACTGAGACTGTCCTGCGCCGCGAGCGGCTTCACGTTCTCCTCCTACTCCA |
| | | TGAACTGGGTCCGCCAAGCCCCCGGGAAGGGACTGGAATGGGTGTCCTCT |
| | | ATCTCCTCGTCGTCGTCCTACATCTACTACGCCGACTCCGTGAAGGGAAG |
| | | ATTCACCATTTCCCGCGACAACGCAAAGAACTCACTGTACTTGCAAATGA |
| | | ACTCACTCCGGGCCGAAGATACTGCTGTGTACTATTGCGCCAAGACTATT |
| | | GCCGCCGTCTACGCTTTCGACATCTGGGGCCAGGGAACCACCGTGACTGT |
| | | GTCGTCCGGTGGTGGTGGCTCGGGCGGAGGAGGAAGCGGCGGCGGGGGGT |
| | | CCGAGATTGTGCTGACCCAGTCGCCACTGAGCCTCCCTGTGACCCCCGAG |
| | | GAACCCGCCAGCATCAGCTGCCGGTCCAGCCAGTCCCTGCTCCACTCCAA |
| | | CGGATACAATTACCTCGATTGGTACCTTCAGAAGCCTGGACAAAGCCCGC |
| | | AGCTGCTCATCTACTTGGGATCAAACCGCGCGTCAGGAGTGCCTGACCGG |
| | | TTCTCCGGCTCGGGCAGCGGTACCGATTTCACCCTGAAAATCTCCAGGGT |
| | | GGAGGCAGAGGACGTGGGAGTGTATTACTGTATGCAGGCGCTGCAGACTC |
| | | CGTACACATTTGGGCAGGGCACCAAGCTGGAGATCAAG |
| 149364-aa VH | 8073 | EVQLVESGGGLVKPGGSLRLSCAASGFTFSSYSMNWVRQAPGKGLEWVSS |
| | | ISSSSSYIYYADSVKGRFTISRDNAKNSLYLQMNSLRAEDTAVYYCAKTI |
| | | AAVYAFDIWGQGTTVTVSS |
| 149364-aa VL | 8094 | EIVLTQSPLSLPVTPEEPASISCRSSQSLLHSNGYNYLDWYLQKPGQSPQ |
| | | LLIYLGSNRASGVPDRFSGSGSGTDFTLKISRVEAEDVGVYYCMQALQTP |
| | | YTFGQGTKLEIK |

149365

| | | |
|---|---|---|
| 149365-aa | 8032 | EVQLVESGGGLVKPGGSLRLSCAASGFTFSDYYMSWIRQAPGKGLEWVSY |
| ScFv domain | | ISSSGSTIYYADSVKGRFTISRDNAKNSLYLQMNSLRAEDTAVYYCARDL |
| | | RGAFDIWGQGTMVTVSSGGGGSGGGGSGGGGSSYVLTQSPSVSAAPGYTA |
| | | TISCGGNNIGTKSVHWYQQKPGQAPLLVIRDDSVRPSKIPGRFSGSNSGN |
| | | MATLTISGVQAGDEADFYCQVWDSDSEHVVFGGGTKLTVL |
| 149365-nt | 8053 | GAAGTCCAGCTCGTGGAGTCCGGCGGAGGCCTTGTGAAGCCTGGAGGTTC |
| ScFv domain | | GCTGAGACTGTCCTGCGCCGCCTCCGGCTTCACCTTCTCCGACTACTACA |
| | | TGTCCTGGATCAGACAGGCCCCGGGAAAGGGCCTGGAATGGGTGTCCTAC |
| | | ATCTCGTCATCGGGCAGCACTATCTACTACGCGGACTCAGTGAAGGGGCG |
| | | GTTCACCATTTCCCGGGATAACGCGAAGAACTCGCTGTATCTGCAAATGA |
| | | ACTCACTGAGGGCCGAGGACACCGCCGTGTACTACTGCGCCCGCGATCTC |
| | | CGCGGGGCATTTGACATCTGGGGACAGGGAACCATGGTCACAGTGTCCAG |
| | | CGGAGGGGGAGGATCGGGTGGCGGAGGTTCCGGGGGTGGAGGCTCCTCCT |
| | | ACGTGCTGACTCAGAGCCCAAGCGTCAGCGCTGCGCCCGGTTACACGGCA |
| | | ACCATCTCCTGTGGCGGAAACAACATTGGGACCAAGTCTGTGCACTGGTA |
| | | TCAGCAGAAGCCGGGCCAAGCTCCCCTGTTGGTGATCCGCGATGACTCCG |
| | | TGCGGCCTAGCAAAATTCCGGGACGGTTCTCCGGCTCCAACAGCGGCAAT |
| | | ATGGCCACTCTCACCATCTCGGGAGTGCAGGCCGGAGATGAAGCCGACTT |
| | | CTACTGCCAAGTCTGGGACTCAGACTCCGAGCATGTGGTGTTCGGGGGCG |
| | | GAACCAAGCTGACTGTGCTC |
| 149365-aa VH | 8074 | EVQLVESGGGLVKPGGSLRLSCAASGFTFSDYYMSWIRQAPGKGLEWVSY |
| | | ISSSGSTIYYADSVKGRFTISRDNAKNSLYLQMNSLRAEDTAVYYCARDL |
| | | RGAFDIWGQGTMVTVSS |
| 149365-aa VL | 8095 | SYVLTQSPSVSAAPGYTATISCGGNNIGTKSVHWYQQKPGQAPLLVIRDD |
| | | SVRPSKIPGRFSGSNSGNMATLTISGVQAGDEADFYCQVWDSDSEHVVFG |
| | | GGTKLTVL |

149366

| | | |
|---|---|---|
| 149366-aa | 8033 | QVQLVQSGAEVKKPGASVKVSCKPSGYTVTSHYIHWVRRAPGQGLEWMGM |
| ScFv domain | | INPSGGVTAYSQTLQGRVTMTSDTSSSTVYMELSSLRSEDTAMYYCAREG |
| | | SGSGWYFDFWGRGTLVTVSSGGGGSGGGGSGGGGSSYVLTQPPSVSVSPG |
| | | QTASITCSGDGLSKKYVSWYQQKAGQSPVVLISRDKERPSGIPDRFSGSN |
| | | SADTATLTISGTQAMDEADYYCQAWDDTTVVFGGGTKLTVL |
| 149366-nt | 8054 | CAAGTGCAGCTGGTGCAGAGCGGGGCCGAAGTCAAGAAGCCGGGAGCCTC |
| ScFv domain | | CGTGAAAGTGTCCTGCAAGCCTTCGGGATACACCGTGACCTCCCACTACA |
| | | TTCATTGGGTCCGCCGCGCCCCCGGCCAAGGACTCGAGTGGATGGGCATG |
| | | ATCAACCCTAGCGGCGGAGTGACCGCGTACAGCCAGACGCTGCAGGGACG |
| | | CGTGACTATGACCTCGGATACCTCCTCCTCCACCGTCTATATGGAACTGT |
| | | CCAGCCTGCGGTCCGAGGATACCGCCATGTACTACTGCGCCCGGGAAGGA |
| | | TCAGGCTCCGGGTGGTATTTCGACTTCTGGGGAAGAGGCACCCTCGTGAC |
| | | TGTGTCATCTGGGGGAGGGGGTTCCGGTGGTGGCGGATCGGGAGGAGGCG |
| | | GTTCATCCTACGTGCTGACCCAGCCACCCTCCGTGTCCGTGAGCCCCGGC |
| | | CAGACTGCATCGATTACATGTAGCGGCGACGGCCTCTCCAAGAAATACGT |
| | | GTCGTGGTACCAGCAGAAGGCCGGACAGAGCCCGGTGGTGCTGATCTCAA |
| | | GAGATAAGGAGCGGCCTAGCGGAATCCCGGACAGGTTCTCGGGTTCCAAC |
| | | TCCGCGGACACTGCTACTCTGACCATCTCGGGGACCCAGGCTATGGACGA |
| | | AGCCGATTACTACTGCCAAGCCTGGGACGACACTACTGTCGTGTTTGGAG |
| | | GGGGCACCAAGTTGACCGTCCTT |
| 149366-aa VH | 8075 | QVQLVQSGAEVKKPGASVKVSCKPSGYTVTSHYIHWVRRAPGQGLEWMGM |
| | | INPSGGVTAYSQTLQGRVTMTSDTSSSTVYMELSSLRSEDTAMYYCAREG |
| | | SGSGWYFDFWGRGTLVTVSS |
| 149366-aa VL | 8096 | SYVLTQPPSVSVSPGQTASITCSGDGLSKKYVSWYQQKAGQSPVVLISRD |
| | | KERPSGIPDRFSGSNSADTATLTISGTQAMDEADYYCQAWDDTTVVFGGG |
| | | TKLTVL |

149367

| | | |
|---|---|---|
| 149367-aa | 8034 | QVQLQESGPGLVKPSQTLSLTCTVSGGSISSGGYYWSWIRQHPGKGLEWI |
| ScFv domain | | GYIYYSGSTYYNPSLKSRVTISVDTSKNQFSLKLSSVTAADTAVYYCARA |
| | | GIAARLRGAFDIWGQGTMVTVSSGGGGSGGGGSGGGGSDIVMTQSPSSVS |
| | | ASVGDRVIITCRASQGIRNWLAWYQQKPGKAPNLLIYAASNLQSGVPSRF |
| | | SGSGSGADFTLTISSLQPEDVATYYCQKYNSAPFTFGPGTKVDIK |
| 149367-nt | 8055 | CAAGTGCAGCTTCAGGAGAGCGGCCCGGGACTCGTGAAGCCGTCCCAGAC |
| ScFv domain | | CCTGTCCCTGACTTGCACCGTGTCGGGAGGAAGCATCTCGAGCGGAGGCT |
| | | ACTATTGGTCGTGGATTCGGCAGCACCCTGGAAAGGGCCTGGAATGGATC |
| | | GGCTACATCTACTACTCCGGCTCGACCTACTACAACCCATCGCTGAAGTC |
| | | CAGAGTGACAATCTCAGTGGACACGTCCAAGAATCAGTTCAGCCTGAAGC |
| | | TCTCTTCCGTGACTGCGGCCGACACCGCCGTGTACTACTGCGCACGCGCT |
| | | GGAATTGCCGCCCGGCTGAGGGGTGCCTTCGACATTTGGGGACAGGGCAC |
| | | CATGGTCACCGTGTCCTCCGGCGGCGGAGGTTCCGGGGGTGGAGGCTCAG |
| | | GAGGAGGGGGGTCCGACATCGTCATGACTCAGTCGCCCTCAAGCGTCAGC |
| | | GCGTCCGTCGGGGACAGAGTGATCATCACCTGTCGGGCGTCCCAGGGAAT |
| | | TCGCAACTGGCTGGCCTGGTATCAGCAGAAGCCCGGAAAGGCCCCCAACC |
| | | TGTTGATCTACGCCGCCTCAAACCTCCAATCCGGGGTGCCGAGCCGCTTC |
| | | AGCGGCTCCGGTTCGGGTGCCGATTTCACTCTGACCATCTCCTCCCTGCA |
| | | ACCTGAAGATGTGGCTACCTACTACTGCCAAAAGTACAACTCCGCACCTT |
| | | TTACTTTCGGACCGGGGACCAAAGTGGACATTAAG |
| 149367-aa VH | 8076 | QVQLQESGPGLVKPSQTLSLTCTVSGGSISSGGYYWSWIRQHPGKGLEWI |
| | | GYIYYSGSTYYNPSLKSRVTISVDTSKNQFSLKLSSVTAADTAVYYCARA |
| | | GIAARLRGAFDIWGQGTMVTVSS |
| 149367-aa VL | 8097 | DIVMTQSPSSVSASVGDRVIITCRASQGIRNWLAWYQQKPGKAPNLLIYA |
| | | ASNLQSGVPSRFSGSGSGADFTLTISSLQPEDVATYYCQKYNSAPFTFGP |
| | | GTKVDIK |

149368

| | | |
|---|---|---|
| 149368-aa | 8035 | QVQLVQSGAEVKKPGSSVKVSCKASGGTFSSYAISWVRQAPGQGLEWMGG |
| ScFv domain | | IIPIFGTANYAQKFQGRVTITADESTSTAYMELSSLRSEDTAVYYCARRG |
| | | GYQLLRWDVGLLRSAFDIWGQGTMVTVSSGGGGSGGGGSGGGGSSYVLTQ |
| | | PPSVSVAPGQTARITCGGNNIGSKSVHWYQQKPGQAPVLVLYGKNNRPSG |
| | | VPDRFSGSRSGTTASLTITGAQAEDEADYYCSSRDSSGDHLRVFGTGTKV |
| | | TVL |
| 149368-nt | 8056 | CAAGTGCAGCTGGTCCAGTCGGGCGCCGAGGTCAAGAAGCCCGGGAGCTC |
| ScFv domain | | TGTGAAAGTGTCCTGCAAGGCCTCCGGGGGCACCTTTAGCTCCTACGCCA |
| | | TCTCCTGGGTCCGCCAAGCACCGGGTCAAGGCCTGGAGTGGATGGGGGGA |
| | | ATTATCCCTATCTTCGGCACTGCCAACTACGCCCAGAAGTTCCAGGGACG |
| | | CGTGACCATTACCGCGGACGAATCCACCTCCACCGCTTATATGGAGCTGT |
| | | CCAGCTTGCGCTCGGAAGATACCGCCGTGTACTACTGCGCCCGGAGGGGT |
| | | GGATACCAGCTGCTGAGATGGGACGTGGGCCTCCTGCGGTCGGCGTTCGA |
| | | CATCTGGGGCCAGGGCACTATGGTCACTGTGTCCAGCGGAGGAGGCGGAT |
| | | CGGGAGGCGGCGGATCAGGGGGAGGCGGTTCCAGCTACGTGCTTACTCAA |
| | | CCCCCTTCGGTGTCCGTGGCCCCGGGACAGACCGCCAGAATCACTTGCGG |
| | | AGGAAACAACATTGGGTCCAAGAGCGTGCATTGGTACCAGCAGAAGCCAG |
| | | GACAGGCCCCTGTGCTGGTGCTCTACGGGAAGAACAATCGGCCCAGCGGA |
| | | GTGCCGGACAGGTTCTCGGGTTCACGCTCCGGTACAACCGCTTCACTGAC |
| | | TATCACCGGGGCCCAGGCAGAGGATGAAGCGGACTACTACTGTTCCTCCC |
| | | GGGATTCATCCGGCGACCACCTCCGGGTGTTCGGAACCGGAACGAAGGTC |
| | | ACCGTGCTG |
| 149368-aa VH | 8077 | QVQLVQSGAEVKKPGSSVKVSCKASGGTFSSYAISWVRQAPGQGLEWMGG |
| | | IIPIFGTANYAQKFQGRVTITADESTSTAYMELSSLRSEDTAVYYCARRG |
| | | GYQLLRWDVGLLRSAFDIWGQGTMVTVSS |
| 149368-aa VL | 8098 | SYVLTQPPSVSVAPGQTARITCGGNNIGSKSVHWYQQKPGQAPVLVLYGK |
| | | NNRPSGVPDRFSGSRSGTTASLTITGAQAEDEADYYCSSRDSSGDHLRVF |
| | | GTGTKVTVL |

149369

| | | |
|---|---|---|
| 149369-aa | 8036 | EVQLQQSGPGLVKPSQTLSLTCAISGDSVSSNSAAWNWIRQSPSRGLEWL |
| ScFv domain | | GRTYYRSKWYSFYAISLKSRIIINPDTSKNQFSLQLKSVTPEDTAVYYCA |
| | | RSSPEGLFLYWFDPWGQGTLVTVSSGGDGSGGGGSGGGGSSSELTQDPAV |
| | | SVALGQTIRITCQGDSLGNYYATWYQQKPGQAPVLVIYGTNNRPSGIPDR |
| | | FSASSSGNTASLTITGAQAEDEADYYCNSRDSSGHHLLFGTGTKVTVL |
| 149369-nt | 8057 | GAAGTGCAGCTCCAACAGTCAGGACCGGGGCTCGTGAAGCCATCCCAGAC |
| ScFv domain | | CCTGTCCCTGACTTGTGCCATCTCGGGAGATAGCGTGTCATCGAACTCCG |
| | | CCGCCTGGAACTGGATTCGGCAGAGCCCGTCCCGCGGACTGGAGTGGCTT |
| | | GGAAGGACCTACTACCGGTCCAAGTGGTACTCTTTCTACGCGATCTCGCT |
| | | GAAGTCCCGCATTATCATTAACCCTGATACCTCCAAGAATCAGTTCTCCC |
| | | TCCAACTGAAATCCGTCACCCCCGAGGACACAGCAGTGTATTACTGCGCA |
| | | CGGAGCAGCCCCGAAGGACTGTTCCTGTATTGGTTTGACCCCTGGGGCCA |
| | | GGGGACTCTTGTGACCGTGTCGAGCGGCGGAGATGGGTCCGGTGGCGGTG |
| | | GTTCGGGGGGCGGCGGATCATCATCCGAACTGACCCAGGACCCGGCTGTG |
| | | TCCGTGGCGCTGGGACAAACCATCCGCATTACGTGCCAGGGAGACTCCCT |
| | | GGGCAACTACTACGCCACTTGGTACCAGCAGAAGCCGGGCCAAGCCCCTG |
| | | TGTTGGTCATCTACGGGACCAACAACAGACCTTCCGGCATCCCCGACCGG |
| | | TTCAGCGCTTCGTCCTCCGGCAACACTGCCAGCCTGACCATCACTGGAGC |
| | | GCAGGCCGAAGATGAGGCCGACTACTACTGCAACAGCAGAGACTCCTCGG |
| | | GTCATCACCTCTTGTTCGGAACTGGAACCAAGGTCACCGTGCTG |
| 149369-aa VH | 8078 | EVQLQQSGPGLVKPSQTLSLTCAISGDSVSSNSAAWNWIRQSPSRGLEWL |
| | | GRTYYRSKWYSFYAISLKSRIIINPDTSKNQFSLQLKSVTPEDTAVYYCA |
| | | RSSPEGLFLYWFDPWGQGTLVTVSS |
| 149369-aa VL | 8099 | SSELTQDPAVSVALGQTIRITCQGDSLGNYYATWYQQKPGQAPVLVIYGT |
| | | NNRPSGIPDRFSASSSGNTASLTITGAQAEDEADYYCNSRDSSGHHLLFG |
| | | TGTKVTVL |

BCMA_EBB-C1978-A4

| | | |
|---|---|---|
| BCMA_EBB- | 8037 | EVQLVESGGGLVQPGGSLRLSCAASGFTFSSYAMSWVRQAPGKGLEWVSA |
| C1978-A4 - aa | | ISGSGGSTYYADSVKGRFTISRDNSKNTLYLQMNSLRAEDTAVYYCAKVE |
| ScFv domain | | GSGSLDYWGQGTLVTVSSGGGGSGGGGSGGGGSEIVMTQSPGTLSLSPGE |
| | | RATLSCRASQSVSSAYLAWYQQKPGQPPRLLISGASTRATGIPDRFGGSG |
| | | SGTDFTLTISRLEPEDFAVYYCQHYGSSFNGSSLFTFGQGTRLEIK |
| BCMA_EBB- | 8058 | GAAGTGCAGCTCGTGGAGTCAGGAGGCGGCCTGGTCCAGCCGGGAGGGTC |
| C1978-A4 - nt | | CCTTAGACTGTCATGCGCCGCAAGCGGATTCACTTTCTCCTCCTATGCCA |
| ScFv domain | | TGAGCTGGGTCCGCCAAGCCCCCGGAAAGGGACTGGAATGGGTGTCCGCC |
| | | ATCTCGGGGTCTGGAGGCTCAACTTACTACGCTGACTCCGTGAAGGGACG |
| | | GTTCACCATTAGCCGCGACAACTCCAAGAACACCCTCTACCTCCAAATGA |
| | | ACTCCCTGCGGGCCGAGGATACCGCCGTCTACTACTGCGCCAAAGTGGAA |
| | | GGTTCAGGATCGCTGGACTACTGGGGACAGGGTACTCTCGTGACCGTGTC |
| | | ATCGGGCGGAGGAGGTTCCGGCGGTGGCGGCTCCGGCGGCGGAGGGTCGG |
| | | AGATCGTGATGACCCAGAGCCCTGGTACTCTGAGCCTTTCGCCGGGAGAA |
| | | AGGGCCACCCTGTCCTGCCGCGCTTCCCAATCCGTGTCCTCCGCGTACTT |
| | | GGCGTGGTACCAGCAGAAGCCGGGACAGCCCCCTCGGCTGCTGATCAGCG |
| | | GGGCCAGCACCCGGGCAACCGGAATCCCAGACAGATTCGGGGGTTCCGGC |
| | | AGCGGCACAGATTTCACCCTGACTATTTCGAGGTTGGAGCCCGAGGACTT |
| | | TGCGGTGTATTACTGTCAGCACTACGGGTCGTCCTTTAATGGCTCCAGCC |
| | | TGTTCACGTTCGGACAGGGGACCCGCCTGGAAATCAAG |
| BCMA_EBB- | 8079 | EVQLVESGGGLVQPGGSLRLSCAASGFTFSSYAMSWVRQAPGKGLEWVSA |
| C1978-A4 - aa | | ISGSGGSTYYADSVKGRFTISRDNSKNTLYLQMNSLRAEDTAVYYCAKVE |
| VH | | GSGSLDYWGQGTLVTVSS |
| BCMA_EBB- | 8100 | EIVMTQSPGTLSLSPGERATLSCRASQSVSSAYLAWYQQKPGQPPRLLIS |
| C1978-A4 - aa | | GASTRATGIPDRFGGSGSGTDFTLTISRLEPEDFAVYYCQHYGSSFNGSS |
| VL | | LFTFGQGTRLEIK |

BCMA_EBB-C1978-G1

| | | |
|---|---|---|
| BCMA_EBB- | 8038 | EVQLVETGGGLVQPGGSLRLSCAASGITFSRYPMSWVRQAPGKGLEWVSG |
| C1978-G1 - aa | | ISDSGVSTYYADSAKGRFTISRDNSKNTLFLQMSSLRDEDTAVYYCVTRA |
| ScFv domain | | GSEASDIWGQGTMVTVSSGGGGSGGGGSGGGGSEIVLTQSPATLSLSPGE |
| | | RATLSCRASQSVSNSLAWYQQKPGQAPRLLIYDASSRATGIPDRFSGSGS |
| | | GTDFTLTISRLEPEDFAIYYCQQFGTSSGLTFGGGTKLEIK |
| BCMA_EBB- | 8059 | GAAGTGCAACTGGTGGAAACCGGTGGCGGCCTGGTGCAGCCTGGAGGATC |
| C1978-G1 - nt | | ATTGAGGCTGTCATGCGCGGCCAGCGGTATTACCTTCTCCCGGTACCCCA |
| ScFv domain | | TGTCCTGGGTCAGACAGGCCCCGGGGAAAGGGCTTGAATGGGTGTCCGGG |
| | | ATCTCGGACTCCGGTGTCAGCACTTACTACGCCGACTCCGCCAAGGGACG |
| | | CTTCACCATTTCCCGGGACAACTCGAAGAACACCCTGTTCCTCCAAATGA |
| | | GCTCCCTCCGGGACGAGGATACTGCAGTGTACTACTGCGTGACCCGCGCC |
| | | GGGTCCGAGGCGTCTGACATTTGGGGACAGGGCACTATGGTCACCGTGTC |
| | | GTCCGGCGGAGGGGGCTCGGGAGGCGGTGGCAGCGGAGGAGGAGGGTCCG |
| | | AGATCGTGCTGACCCAATCCCCGGCCACCCTCTCGCTGAGCCCTGGAGAA |
| | | AGGGCAACCTTGTCCTGTCGCGCGAGCCAGTCCGTGAGCAACTCCCTGGC |
| | | CTGGTACCAGCAGAAGCCCGGACAGGCTCCGAGACTTCTGATCTACGACG |
| | | CTTCGAGCCGGGCCACTGGAATCCCCGACCGCTTTTCGGGGTCCGGCTCA |
| | | GGAACCGATTTCACCCTGACAATCTCACGGCTGGAGCCAGAGGATTTCGC |
| | | CATCTATTACTGCCAGCAGTTCGGTACTTCCTCCGGCCTGACTTTCGGAG |
| | | GCGGCACGAAGCTCGAAATCAAG |
| BCMA_EBB- | 8080 | EVQLVETGGGLVQPGGSLRLSCAASGITFSRYPMSWVRQAPGKGLEWVSG |
| C1978-G1 - aa | | ISDSGVSTYYADSAKGRFTISRDNSKNTLFLQMSSLRDEDTAVYYCVTRA |
| VH | | GSEASDIWGQGTMVTVSS |
| BCMA_EBB- | 8101 | EIVLTQSPATLSLSPGERATLSCRASQSVSNSLAWYQQKPGQAPRLLIYD |
| C1978-G1 - aa | | ASSRATGIPDRFSGSGSGTDFTLTISRLEPEDFAIYYCQQFGTSSGLTFG |
| VL | | GGTKLEIK |

BCMA_EBB-C1979-C1

| | | |
|---|---|---|
| BCMA_EBB- | 8039 | QVQLVESGGGLVQPGGSLRLSCAASGFTFSSYAMSWVRQAPGKGLEWVSA |
| C1979-C1 - aa | | ISGSGGSTYYADSVKGRFTISRDNAKNSLYLQMNSLRAEDTAIYYCARAT |
| ScFv domain | | YKRELRYYYGMDVWGQGTMVTVSSGGGGSGGGGSGGGGSEIVMTQSPGTV |
| | | SLSPGERATLSCRASQSVSSSFLAWYQQKPGQAPRLLIYGASSRATGIPD |
| | | RFSGSGSGTDFTLTISRLEPEDSAVYYCQQYHSSPSWTFGQGTRLEIK |
| BCMA_EBB- | 8060 | CAAGTGCAGCTCGTGGAATCGGGTGGCGGACTGGTGCAGCCGGGGGGCTC |
| C1979-C1 - nt | | ACTTAGACTGTCCTGCGCGGCCAGCGGATTCACTTTCTCCTCCTACGCCA |
| ScFv domain | | TGTCCTGGGTCAGACAGGCCCCTGGAAAGGGCCTGGAATGGGTGTCCGCA |
| | | ATCAGCGGCAGCGGCGGCTCGACCTATTACGCGGATTCAGTGAAGGGCAG |
| | | ATTCACCATTTCCCGGGACAACGCCAAGAACTCCTTGTACCTTCAAATGA |
| | | ACTCCCTCCGCGCGGAAGATACCGCAATCTACTACTGCGCTCGGGCCACT |
| | | TACAAGAGGGAACTGCGCTACTACTACGGGATGGACGTCTGGGGCCAGGG |
| | | AACCATGGTCACCGTGTCCAGCGGAGGAGGAGGATCGGGAGGAGGCGGTA |
| | | GCGGGGGTGGAGGGTCGGAGATCGTGATGACCCAGTCCCCCGGCACTGTG |
| | | TCGCTGTCCCCCGGCGAACGGGCCACCCTGTCATGTCGGGCCAGCCAGTC |
| | | AGTGTCGTCAAGCTTCCTCGCCTGGTACCAGCAGAAACCGGGACAAGCTC |
| | | CCCGCCTGCTGATCTACGGAGCCAGCAGCCGGGCCACCGGTATTCCTGAC |
| | | CGGTTCTCCGGTTCGGGGTCCGGGACCGACTTTACTCTGACTATCTCTCG |
| | | CCTCGAGCCAGAGGACTCCGCCGTGTATTACTGCCAGCAGTACCACTCCT |
| | | CCCCGTCCTGGACGTTCGGACAGGGCACAAGGCTGGAGATTAAG |
| BCMA_EBB- | 8081 | QVQLVESGGGLVQPGGSLRLSCAASGFTFSSYAMSWVRQAPGKGLEWVSA |
| C1979-C1 - aa | | ISGSGGSTYYADSVKGRFTISRDNAKNSLYLQMNSLRAEDTAIYYCARAT |
| VH | | YKRELRYYYGMDVWGQGTMVTVSS |
| BCMA_EBB- | 8102 | EIVMTQSPGTVSLSPGERATLSCRASQSVSSSFLAWYQQKPGQAPRLLIY |
| C1979-C1 - aa | | GASSRATGIPDRFSGSGSGTDFTLTISRLEPEDSAVYYCQQYHSSPSWTF |
| VL | | GQGTRLEIK |

BCMA_EBB-C1978-C7

| | | |
|---|---|---|
| BCMA_EBB- | 8040 | EVQLVETGGGLVQPGGSLRLSCAASGFTFSSYAMSWVRQAPGKGLEWVSA |
| C1978-C7 - aa | | ISGSGGSTYYADSVKGRFTISRDNSKNTLYLQMNTLKAEDTAVYYCARAT |
| ScFv domain | | YKRELRYYYGMDVWGQGTTVTVSSGGGGSGGGGSGGGGSEIVLTQSPSTL |
| | | SLSPGESATLSCRASQSVSTTFLAWYQQKPGQAPRLLIYGSSNRATGIPD |
| | | RFSGSGSGTDFTLTIRRLEPEDFAVYYCQQYHSSPSWTFGQGTKVEIK |
| BCMA_EBB- | 8061 | GAGGTGCAGCTTGTGGAAACCGGTGGCGGACTGGTGCAGCCCGGAGGAAG |
| C1978-C7 - nt | | CCTCAGGCTGTCCTGCGCCGCGTCCGGCTTCACCTTCTCCTCGTACGCCA |
| ScFv domain | | TGTCCTGGGTCCGCCAGGCCCCCGGAAAGGGCCTGGAATGGGTGTCCGCC |
| | | ATCTCTGGAAGCGGAGGTTCCACGTACTACGCGGACAGCGTCAAGGGAAG |
| | | GTTCACAATCTCCCGCGATAATTCGAAGAACACTCTGTACCTTCAAATGA |
| | | ACACCCTGAAGGCCGAGGACACTGCTGTGTACTACTGCGCACGGGCCACC |
| | | TACAAGAGAGAGCTCCGGTACTACTACGGAATGGACGTCTGGGGCCAGGG |
| | | AACTACTGTGACCGTGTCCTCGGGAGGGGGTGGCTCCGGGGGGGGCGGCT |
| | | CCGGCGGAGGCGGTTCCGAGATTGTGCTGACCCAGTCACCTTCAACTCTG |
| | | TCGCTGTCCCCGGGAGAGAGCGCTACTCTGAGCTGCCGGGCCAGCCAGTC |
| | | CGTGTCCACCACCTTCCTCGCCTGGTATCAGCAGAAGCCGGGGCAGGCAC |
| | | CACGGCTCTTGATCTACGGGTCAAGCAACAGAGCGACCGGAATTCCTGAC |
| | | CGCTTCTCGGGGAGCGGTTCAGGCACCGACTTCACCCTGACTATCCGGCG |
| | | CCTGGAACCCGAAGATTTCGCCGTGTATTACTGTCAACAGTACCACTCCT |
| | | CGCCGTCCTGGACCTTTGGCCAAGGAACCAAAGTGGAAATCAAG |
| BCMA_EBB- | 8082 | EVQLVETGGGLVQPGGSLRLSCAASGFTFSSYAMSWVRQAPGKGLEWVSA |
| C1978-C7 - aa | | ISGSGGSTYYADSVKGRFTISRDNSKNTLYLQMNTLKAEDTAVYYCARAT |
| VH | | YKRELRYYYGMDVWGQGTTVTVSS |
| BCMA_EBB- | 8103 | EIVLTQSPSTLSLSPGESATLSCRASQSVSTTFLAWYQQKPGQAPRLLIY |
| C1978-C7 - aa | | GSSNRATGIPDRFSGSGSGTDFTLTIRRLEPEDFAVYYCQQYHSSPSWTF |
| VL | | GQGTKVEIK |

BCMA_EBB-C1978-D10

| | | |
|---|---|---|
| BCMA_EBB- | 8041 | EVQLVETGGGLVQPGRSLRLSCAASGFTFDDYAMHWVRQAPGKGLEWVSG |
| C1978-D10 - | | ISWNSGSIGYADSVKGRFTISRDNAKNSLYLQMNSLRDEDTAVYYCARVG |
| aa | | KAVPDVWGQGTTVTVSSGGGGSGGGGSGGGGSDIVMTQTPSSLSASVGDR |
| ScFv domain | | VTITCRASQSISSYLNWYQQKPGKAPKLLIYAASSLQSGVPSRFSGSGSG |
| | | TDFTLTISSLQPEDFATYYCQQSYSTPYSFGQGTRLEIK |
| BCMA_EBB- | 8062 | GAAGTGCAGCTCGTGGAAACTGGAGGTGGACTCGTGCAGCCTGGACGGTC |
| C1978-D10- nt | | GCTGCGGCTGAGCTGCGCTGCATCCGGCTTCACCTTCGACGATTATGCCA |
| ScFv domain | | TGCACTGGGTCAGACAGGCGCCAGGGAAGGGACTTGAGTGGGTGTCCGGT |
| | | ATCAGCTGGAATAGCGGCTCAATCGGATACGCGGACTCCGTGAAGGGAAG |
| | | GTTCACCATTTCCCGCGACAACGCCAAGAACTCCCTGTACTTGCAAATGA |
| | | ACAGCCTCCGGGATGAGGACACTGCCGTGTACTACTGCGCCCGCGTCGGA |
| | | AAAGCTGTGCCCGACGTCTGGGGCCAGGGAACCACTGTGACCGTGTCCAG |
| | | CGGCGGGGGTGGATCGGGCGGTGGAGGGTCCGGTGGAGGGGGCTCAGATA |
| | | TTGTGATGACCCAGACCCCCTCGTCCCTGTCCGCCTCGGTCGGCGACCGC |
| | | GTGACTATCACATGTAGAGCCTCGCAGAGCATCTCCAGCTACCTGAACTG |
| | | GTATCAGCAGAAGCCGGGGAAGGCCCCGAAGCTCCTGATCTACGCGGCAT |
| | | CATCACTGCAATCGGGAGTGCCGAGCCGGTTTTCCGGGTCCGGCTCCGGC |
| | | ACCGACTTCACGCTGACCATTTCTTCCCTGCAACCCGAGGACTTCGCCAC |
| | | TTACTACTGCCAGCAGTCCTACTCCACCCCTTACTCCTTCGGCCAAGGAA |
| | | CCAGGCTGGAAATCAAG |
| BCMA_EBB- | 8083 | EVQLVETGGGLVQPGRSLRLSCAASGFTFDDYAMHWVRQAPGKGLEWVSG |
| C1978-D10 - | | ISWNSGSIGYADSVKGRFTISRDNAKNSLYLQMNSLRDEDTAVYYCARVG |
| aa | | KAVPDVWGQGTTVTVSS |
| VH | | |
| BCMA_EBB- | 8104 | DIVMTQTPSSLSASVGDRVTITCRASQSISSYLNWYQQKPGKAPKLLIYA |
| C1978-D10- aa | | ASSLQSGVPSRFSGSGSGTDFTLTISSLQPEDFATYYCQQSYSTPYSEGQ |
| VL | | GTRLEIK |

BCMA_EBB-C1979-C12

| | | |
|---|---|---|
| BCMA_EBB- | 8042 | EVQLVESGGGLVQPGRSLRLSCTASGFTFDDYAMHWVRQRPGKGLEWVAS |
| C1979-C12- aa | | INWKGNSLAYGDSVKGRFAISRDNAKNTVFLQMNSLRTEDTAVYYCASHQ |
| ScFv domain | | GVAYYNYAMDVWGRGTLVTVSSGGGGSGGGGSGGGGSEIVLTQSPGTLSL |
| | | SPGERATLSCRATQSIGSSFLAWYQQRPGQAPRLLIYGASQRATGIPDRF |
| | | SGRGSGTDFTLTISRVEPEDSAVYYCQHYESSPSWTFGQGTKVEIK |
| BCMA_EBB- | 8063 | GAAGTGCAGCTCGTGGAGAGCGGGGGAGGATTGGTGCAGCCCGGAAGGTC |
| C1979-C12 - nt | | CCTGCGGCTCTCCTGCACTGCGTCTGGCTTCACCTTCGACGACTACGCGA |
| ScFv domain | | TGCACTGGGTCAGACAGCGCCCGGGAAAGGGCCTGGAATGGGTCGCCTCA |
| | | ATCAACTGGAAGGGAAACTCCCTGGCCTATGGCGACAGCGTGAAGGGCCG |
| | | CTTCGCCATTTCGCGCGACAACGCCAAGAACACCGTGTTTCTGCAAATGA |
| | | ATTCCCTGCGGACCGAGGATACCGCTGTGTACTACTGCGCCAGCCACCAG |
| | | GGCGTGGCATACTATAACTACGCCATGGACGTGTGGGGAAGAGGGACGCT |
| | | CGTCACCGTGTCCTCCGGGGGCGGTGGATCGGGTGGAGGAGGAAGCGGTG |
| | | GCGGGGGCAGCGAAATCGTGCTGACTCAGAGCCCGGGAACTCTTTCACTG |
| | | TCCCCGGGAGAACGGGCCACTCTCTCGTGCCGGGCCACCCAGTCCATCGG |
| | | CTCCTCCTTCCTTGCCTGGTACCAGCAGAGGCCAGGACAGGCGCCCCGCC |
| | | TGCTGATCTACGGTGCTTCCCAACGCGCCACTGGCATTCCTGACCGGTTC |
| | | AGCGGCAGAGGGTCGGGAACCGATTTCACACTGACCATTTCCCGGGTGGA |
| | | GCCCGAAGATTCGGCAGTCTACTACTGTCAGCATTACGAGTCCTCCCCTT |
| | | CATGGACCTTCGGTCAAGGGACCAAAGTGGAGATCAAG |
| BCMA_EBB- | 8084 | EVQLVESGGGLVQPGRSLRLSCTASGFTFDDYAMHWVRQRPGKGLEWVAS |
| C1979-C12 - | | INWKGNSLAYGDSVKGRFAISRDNAKNTVFLQMNSLRTEDTAVYYCASHQ |
| aa | | GVAYYNYAMDVWGRGTLVTVSS |
| VH | | |
| BCMA_EBB- | 8105 | EIVLTQSPGTLSLSPGERATLSCRATQSIGSSFLAWYQQRPGQAPRLLIY |
| C1979-C12 - | | GASQRATGIPDRFSGRGSGTDFTLTISRVEPEDSAVYYCQHYESSPSWTF |
| aa | | GQGTKVEIK |
| VL | | |

BCMA_EBB-C1980-G4

| | | |
|---|---|---|
| BCMA_EBB- | 8043 | EVQLVESGGGLVQPGGSLRLSCAASGFTFSSYAMSWVRQAPGKGLEWVSA |
| C1980-G4- aa | | ISGSGGSTYYADSVKGRFTISRDNSKNTLYLQMNSLRAEDTAVYYCAKVV |
| ScFv domain | | RDGMDVWGQGTTVTVSSGGGGSGGGGSGGGGSEIVLTQSPATLSLSPGER |
| | | ATLSCRASQSVSSSYLAWYQQKPGQAPRLLIYGASSRATGIPDRFSGNGS |
| | | GTDFTLTISRLEPEDFAVYYCQQYGSPPRFTFGPGTKVDIK |
| BCMA_EBB- | 8064 | GAGGTGCAGTTGGTCGAAAGCGGGGGCGGGCTTGTGCAGCCTGGCGGATC |
| C1980-G4- nt | | ACTGCGGCTGTCCTGCGCGGCATCAGGCTTCACGTTTTCTTCCTACGCCA |
| ScFv domain | | TGTCCTGGGTGCGCCAGGCCCCTGGAAAGGGACTGGAATGGGTGTCCGCG |
| | | ATTTCGGGGTCCGGCGGGAGCACCTACTACGCCGATTCCGTGAAGGGCCG |
| | | CTTCACTATCTCGCGGGACAACTCCAAGAACACCCTCTACCTCCAAATGA |
| | | ATAGCCTGCGGGCCGAGGATACCGCCGTCTACTATTGCGCTAAGGTCGTG |
| | | CGCGACGGAATGGACGTGTGGGGACAGGGTACCACCGTGACAGTGTCCTC |
| | | GGGGGGAGGCGGTAGCGGCGGAGGAGGAAGCGGTGGTGGAGGTTCCGAGA |
| | | TTGTGCTGACTCAATCACCCGCGACCCTGAGCCTGTCCCCCGGCGAAAGG |
| | | GCCACTCTGTCCTGTCGGGCCAGCCAATCAGTCTCCTCCTCGTACCTGGC |
| | | CTGGTACCAGCAGAAGCCAGGACAGGCTCCGAGACTCCTTATCTATGGCG |
| | | CATCCTCCCGCGCCACCGGAATCCCGGATAGGTTCTCGGGAAACGGATCG |
| | | GGGACCGACTTCACTCTCACCATCTCCCGGCTGGAACCGGAGGACTTCGC |
| | | CGTGTACTACTGCCAGCAGTACGGCAGCCCGCCTAGATTCACTTTCGGCC |
| | | CCGGCACCAAAGTGGACATCAAG |
| BCMA_EBB- | 8085 | EVQLVESGGGLVQPGGSLRLSCAASGFTFSSYAMSWVRQAPGKGLEWVSA |
| C1980-G4- aa | | ISGSGGSTYYADSVKGRFTISRDNSKNTLYLQMNSLRAEDTAVYYCAKVV |
| VH | | RDGMDVWGQGTTVTVSS |
| BCMA_EBB- | 8106 | EIVLTQSPATLSLSPGERATLSCRASQSVSSSYLAWYQQKPGQAPRLLIY |
| C1980-G4- aa | | GASSRATGIPDRFSGNGSGTDFTLTISRLEPEDFAVYYCQQYGSPPRFTF |
| VL | | GPGTKVDIK |

BCMA_EBB-C1980-D2

| | | |
|---|---|---|
| BCMA_EBB- | 8044 | EVQLLESGGGLVQPGGSLRLSCAASGFTFSSYAMSWVRQAPGKGLEWVSA |
| C1980-D2- aa | | ISGSGGSTYYADSVKGRFTISRDNSKNTLYLQMNSLRAEDTAVYYCAKIP |
| ScFv domain | | QTGTFDYWGQGTLVTVSSGGGGSGGGGSGGGGSEIVLTQSPGTLSLSPGE |
| | | RATLSCRASQSVSSSYLAWYQQRPGQAPRLLIYGASSRATGIPDRFSGSG |
| | | SGTDFTLTISRLEPEDFAVYYCQHYGSSPSWTFGQGTRLEIK |
| BCMA_EBB- | 8065 | GAAGTGCAGCTGCTGGAGTCCGGCGGTGGATTGGTGCAACCGGGGGGATC |
| C1980-D2- nt | | GCTCAGACTGTCCTGTGCGGCGTCAGGCTTCACCTTCTCGAGCTACGCCA |
| ScFv domain | | TGTCATGGGTCAGACAGGCCCCTGGAAAGGGTCTGGAATGGGTGTCCGCC |
| | | ATTTCCGGGAGCGGGGGATCTACATACTACGCCGATAGCGTGAAGGGCCG |
| | | CTTCACCATTTCCCGGGACAACTCCAAGAACACTCTCTATCTGCAAATGA |
| | | ACTCCCTCCGCGCTGAGGACACTGCCGTGTACTACTGCGCCAAAATCCCT |
| | | CAGACCGGCACCTTCGACTACTGGGGACAGGGGACTCTGGTCACCGTCAG |
| | | CAGCGGTGGCGGAGGTTCGGGGGGAGGAGGAAGCGGCGGCGGAGGGTCCG |
| | | AGATTGTGCTGACCCAGTCACCCGGCACTTTGTCCCTGTCGCCTGGAGAA |
| | | AGGGCCACCCTTTCCTGCCGGGCATCCCAATCCGTGTCCTCCTCGTACCT |
| | | GGCCTGGTACCAGCAGAGGCCCGGACAGGCCCCACGGCTTCTGATCTACG |
| | | GAGCAAGCAGCCGCGCGACCGGTATCCCGGACCGGTTTTCGGGCTCGGGC |
| | | TCAGGAACTGACTTCACCCTCACCATCTCCCGCCTGGAACCCGAAGATTT |
| | | CGCTGTGTATTACTGCCAGCACTACGGCAGCTCCCCGTCCTGGACGTTCG |
| | | GCCAGGGAACTCGGCTGGAGATCAAG |
| BCMA_EBB- | 8086 | EVQLLESGGGLVQPGGSLRLSCAASGFTFSSYAMSWVRQAPGKGLEWVSA |
| C1980-D2- aa | | ISGSGGSTYYADSVKGRFTISRDNSKNTLYLQMNSLRAEDTAVYYCAKIP |
| VH | | QTGTFDYWGQGTLVTVSS |
| BCMA_EBB- | 8107 | EIVLTQSPGTLSLSPGERATLSCRASQSVSSSYLAWYQQRPGQAPRLLIY |
| C1980-D2- aa | | GASSRATGIPDRFSGSGSGTDFTLTISRLEPEDFAVYYCQHYGSSPSWTF |
| VL | | GQGTRLEIK |

BCMA_EBB-C1978-A10

| | | |
|---|---|---|
| BCMA_EBB- | 8045 | EVQLVETGGGLVQPGGSLRLSCAASGFTFSSYAMSWVRQAPGKGLEWVSA |
| C1978-A10- aa | | ISGSGGSTYYADSVKGRFTMSRENDKNSVFLQMNSLRVEDTGVYYCARAN |
| ScFv domain | | YKRELRYYYGMDVWGQGTMVTVSSGGGGSGGGGSGGGGSEIVMTQSPGTL |
| | | SLSPGESATLSCRASQRVASNYLAWYQHKPGQAPSLLISGASSRATGVPD |
| | | RFSGSGSGTDFTLAISRLEPEDSAVYYCQHYDSSPSWTFGQGTKVEIK |
| BCMA_EBB- | 8066 | GAAGTGCAACTGGTGGAAACCGGTGGAGGACTCGTGCAGCCTGGCGGCAG |
| C1978-A10- nt | | CCTCCGGCTGAGCTGCGCCGCTTCGGGATTCACCTTTTCCTCCTACGCGA |
| ScFv domain | | TGTCTTGGGTCAGACAGGCCCCCGGAAAGGGGCTGGAATGGGTGTCAGCC |
| | | ATCTCCGGCTCCGGCGGATCAACGTACTACGCCGACTCCGTGAAAGGCCG |
| | | GTTCACCATGTCGCGCGAGAATGACAAGAACTCCGTGTTCCTGCAAATGA |
| | | ACTCCCTGAGGGTGGAGGACACCGGAGTGTACTATTGTGCGCGCGCCAAC |
| | | TACAAGAGAGAGCTGCGGTACTACTACGGAATGGACGTCTGGGGACAGGG |
| | | AACTATGGTGACCGTGTCATCCGGTGGAGGGGGAAGCGGCGGTGGAGGCA |
| | | GCGGGGGCGGGGGTTCAGAAATTGTCATGACCCAGTCCCCGGGAACTCTT |
| | | TCCCTCTCCCCCGGGGAATCCGCGACTTTGTCCTGCCGGGCCAGCCAGCG |
| | | CGTGGCCTCGAACTACCTCGCATGGTACCAGCATAAGCCAGGCCAAGCCC |
| | | CTTCCCTGCTGATTTCCGGGGCTAGCAGCCGCGCCACTGGCGTGCCGGAT |
| | | AGGTTCTCGGGAAGCGGCTCGGGTACCGATTTCACCCTGGCAATCTCGCG |
| | | GCTGGAACCGGAGGATTCGGCCGTGTACTACTGCCAGCACTATGACTCAT |
| | | CCCCCTCCTGGACATTCGGACAGGGCACCAAGGTCGAGATCAAG |
| BCMA_EBB- | 8087 | EVQLVETGGGLVQPGGSLRLSCAASGFTFSSYAMSWVRQAPGKGLEWVSA |
| C1978-A10- aa | | ISGSGGSTYYADSVKGRFTMSRENDKNSVFLQMNSLRVEDTGVYYCARAN |
| VH | | YKRELRYYYGMDVWGQGTMVTVSS |
| BCMA_EBB- | 8108 | EIVMTQSPGTLSLSPGESATLSCRASQRVASNYLAWYQHKPGQAPSLLIS |
| C1978-A10- aa | | GASSRATGVPDRFSGSGSGTDFTLAISRLEPEDSAVYYCQHYDSSPSWTF |
| VL | | GQGTKVEIK |

BCMA_EBB-C1978-D4

| | | |
|---|---|---|
| BCMA_EBB- | 8046 | EVQLLETGGGLVQPGGSLRLSCAASGFSFSSYAMSWVRQAPGKGLEWVSA |
| C1978-D4- aa | | ISGSGGSTYYADSVKGRFTISRDNSKNTLYLQMNSLRAEDTAVYYCAKAL |
| ScFv domain | | VGATGAFDIWGQGTLVTVSSGGGGSGGGGSGGGGSEIVLTQSPGTLSLSP |
| | | GERATLSCRASQSLSSNFLAWYQQKPGQAPGLLIYGASNWATGTPDRFSG |
| | | SGSGTDFTLTITRLEPEDFAVYYCQYYGTSPMYTFGQGTKVEIK |
| BCMA_EBB- | 8067 | GAAGTGCAGCTGCTCGAAACCGGTGGAGGGCTGGTGCAGCCAGGGGGCTC |
| C1978-D4- nt | | CCTGAGGCTTTCATGCGCCGCTAGCGGATTCTCCTTCTCCTCTTACGCCA |
| ScFv domain | | TGTCGTGGGTCCGCCAAGCCCCTGGAAAAGGCCTGGAATGGGTGTCCGCG |
| | | ATTTCCGGGAGCGGAGGTTCGACCTATTACGCCGACTCCGTGAAGGGCCG |
| | | CTTTACCATCTCCCGGGATAACTCCAAGAACACTCTGTACCTCCAAATGA |
| | | ACTCGCTGAGAGCCGAGGACACCGCCGTGTATTACTGCGCGAAGGCGCTG |
| | | GTCGGCGCGACTGGGGCATTCGACATCTGGGGACAGGGAACTCTTGTGAC |
| | | CGTGTCGAGCGGAGGCGGCGGCTCCGGCGGAGGAGGGAGCGGGGGCGGTG |
| | | GTTCCGAAATCGTGTTGACTCAGTCCCCGGGAACCCTGAGCTTGTCACCC |
| | | GGGGAGCGGGCCACTCTCTCCTGTCGCGCCTCCCAATCGCTCTCATCCAA |
| | | TTTCCTGGCCTGGTACCAGCAGAAGCCCGGACAGGCCCCGGGCCTGCTCA |
| | | TCTACGGCGCTTCAAACTGGGCAACGGGAACCCCTGATCGGTTCAGCGGA |
| | | AGCGGATCGGGTACTGACTTTACCCTGACCATCACCAGACTGGAACCGGA |
| | | GGACTTCGCCGTGTACTACTGCCAGTACTACGGCACCTCCCCCATGTACA |
| | | CATTCGGACAGGGTACCAAGGTCGAGATTAAG |
| BCMA_EBB- | 8088 | EVQLLETGGGLVQPGGSLRLSCAASGFSFSSYAMSWVRQAPGKGLEWVSA |
| C1978-D4- aa | | ISGSGGSTYYADSVKGRFTISRDNSKNTLYLQMNSLRAEDTAVYYCAKAL |
| VH | | VGATGAFDIWGQGTLVTVSS |
| BCMA_EBB- | 8109 | EIVLTQSPGTLSLSPGERATLSCRASQSLSSNFLAWYQQKPGQAPGLLIY |
| C1978-D4- aa | | GASNWATGTPDRFSGSGSGTDFTLTITRLEPEDFAVYYCQYYGTSPMYTF |
| VL | | GQGTKVEIK |

BCMA_EBB-C1980-A2

| | | |
|---|---|---|
| BCMA_EBB- | 8047 | EVQLLESGGGLVQPGGSLRLSCAASGFTFSSYAMSWVRQAPGKGLEWVSA |
| C1980-A2- aa | | ISGSGGSTYYADSVKGRFTISRDNSKNTLYLQMNSLRAEDTAVYYCVLWF |
| ScFv domain | | GEGFDPWGQGTLVTVSSGGGGSGGGGSGGGGSDIVLTQSPLSLPVTPGEP |
| | | ASISCRSSQSLLHSNGYNYLDWYLQKPGQSPQLLIYLGSNRASGVPDRFS |
| | | GSGSGTDFTLKISRVEAEDVGVYYCMQALQTPLTFGGGTKVDIK |
| BCMA_EBB- | 8068 | GAAGTGCAGCTGCTTGAGAGCGGTGGAGGTCTGGTGCAGCCCGGGGGATC |
| C1980-A2- nt | | ACTGCGCCTGTCCTGTGCCGCGTCCGGTTTCACTTTCTCCTCGTACGCCA |
| ScFv domain | | TGTCGTGGGTCAGACAGGCACCGGGAAAGGGACTGGAATGGGTGTCAGCC |
| | | ATTTCGGGTTCGGGGGGCAGCACCTACTACGCTGACTCCGTGAAGGGCCG |
| | | GTTCACCATTTCCCGCGACAACTCCAAGAACACCTTGTACCTCCAAATGA |
| | | ACTCCCTGCGGGCCGAAGATACCGCCGTGTATTACTGCGTGCTGTGGTTC |
| | | GGAGAGGGATTCGACCCGTGGGGACAAGGAACACTCGTGACTGTGTCATC |
| | | CGGCGGAGGCGGCAGCGGTGGCGGCGGTTCCGGCGGCGGCGGATCTGACA |
| | | TCGTGTTGACCCAGTCCCCTCTGAGCCTGCCGGTCACTCCTGGCGAACCA |
| | | GCCAGCATCTCCTGCCGGTCGAGCCAGTCCCTCCTGCACTCCAATGGGTA |
| | | CAACTACCTCGATTGGTATCTGCAAAAGCCGGGCCAGAGCCCCCAGCTGC |
| | | TGATCTACCTTGGGTCAAACCGCGCTTCCGGGGTGCCTGATAGATTCTCC |
| | | GGGTCCGGGAGCGGAACCGACTTTACCCTGAAAATCTCGAGGGTGGAGGC |
| | | CGAGGACGTCGGAGTGTACTACTGCATGCAGGCGCTCCAGACTCCCCTGA |
| | | CCTTCGGAGGAGGAACGAAGGTCGACATCAAGA |
| BCMA_EBB- | 8089 | EVQLLESGGGLVQPGGSLRLSCAASGFTFSSYAMSWVRQAPGKGLEWVSA |
| C1980-A2- aa | | ISGSGGSTYYADSVKGRFTISRDNSKNTLYLQMNSLRAEDTAVYYCVLWF |
| VH | | GEGFDPWGQGTLVTVSS |
| BCMA_EBB- | 8110 | DIVLTQSPLSLPVTPGEPASISCRSSQSLLHSNGYNYLDWYLQKPGQSPQ |
| C1980-A2- aa | | LLIYLGSNRASGVPDRFSGSGSGTDFTLKISRVEAEDVGVYYCMQALQTP |
| VL | | LTFGGGTKVDIK |

BCMA_EBB-C1981-C3

| | | |
|---|---|---|
| BCMA_EBB- | 8048 | QVQLVESGGGLVQPGGSLRLSCAASGFTFSSYAMSWVRQAPGKGLEWVSA |
| C1981-C3- aa | | ISGSGGSTYYADSVKGRFTISRDNSKNTLYLQMNSLRAEDTAVYYCAKVG |
| ScFv domain | | YDSSGYYRDYYGMDVWGQGTTVTVSSGGGGSGGGGSGGGGSEIVLTQSPG |
| | | TLSLSPGERATLSCRASQSVSSSYLAWYQQKPGQAPRLLIYGTSSRATGI |
| | | SDRFSGSGSGTDFTLTISRLEPEDFAVYYCQHYGNSPPKFTFGPGTKLEI |
| | | K |
| BCMA_EBB- | 8069 | CAAGTGCAGCTCGTGGAGTCAGGCGGAGGACTGGTGCAGCCCGGGGGCTC |
| C1981-C3- nt | | CCTGAGACTTTCCTGCGCGGCATCGGGTTTTACCTTCTCCTCCTATGCTA |
| ScFv domain | | TGTCCTGGGTGCGCCAGGCCCCGGGAAAGGGACTGGAATGGGTGTCCGCA |
| | | ATCAGCGGTAGCGGGGGCTCAACATACTACGCCGACTCCGTCAAGGGTCG |
| | | CTTCACTATTTCCCGGGACAACTCCAAGAATACCCTGTACCTCCAAATGA |
| | | ACAGCCTCAGGGCCGAGGATACTGCCGTGTACTACTGCGCCAAAGTCGGA |
| | | TACGATAGCTCCGGTTACTACCGGGACTACTACGGAATGGACGTGTGGGG |
| | | ACAGGGCACCACCGTGACCGTGTCAAGCGGCGGAGGCGGTTCAGGAGGGG |
| | | GAGGCTCCGGCGGTGGAGGGTCCGAAATCGTCCTGACTCAGTCGCCTGGC |
| | | ACTCTGTCGTTGTCCCCGGGGGAGCGCGCTACCCTGTCGTGTCGGGCGTC |
| | | GCAGTCCGTGTCGAGCTCCTACCTCGCGTGGTACCAGCAGAAGCCCGGAC |
| | | AGGCCCCTAGACTTCTGATCTACGGCACTTCTTCACGCGCCACCGGGATC |
| | | AGCGACAGGTTCAGCGGCTCCGGCTCCGGGACCGACTTCACCCTGACCAT |
| | | TAGCCGGCTGGAGCCTGAAGATTTCGCCGTGTATTACTGCCAACACTACG |
| | | GAAACTCGCCGCCAAAGTTCACGTTCGGACCCGGAACCAAGCTGGAAATC |
| | | AAG |
| BCMA_EBB- | 8090 | QVQLVESGGGLVQPGGSLRLSCAASGFTFSSYAMSWVRQAPGKGLEWVSA |
| C1981-C3- aa | | ISGSGGSTYYADSVKGRFTISRDNSKNTLYLQMNSLRAEDTAVYYCAKVG |
| VH | | YDSSGYYRDYYGMDVWGQGTTVTVSS |
| BCMA_EBB- | 8111 | EIVLTQSPGTLSLSPGERATLSCRASQSVSSSYLAWYQQKPGQAPRLLIY |
| C1981-C3- aa | | GTSSRATGISDRFSGSGSGTDFTLTISRLEPEDFAVYYCQHYGNSPPKFT |
| VL | | FGPGTKLEIK |

BCMA_EBB-C1978-G4

| | | |
|---|---|---|
| BCMA_EBB- | 8049 | EVQLVESGGGLVQPGGSLRLSCAASGFTFSSYAMSWVRQAPGKGLEWVSA |
| C1978-G4- aa | | ISGSGGSTYYADSVKGRFTISRDNSKNTLYLQMNSLRAEDTAVYYCAKMG |
| ScFv domain | | WSSGYLGAFDIWGQGTTVTVSSGGGGSGGGGSGGGGSEIVLTQSPGTLSL |
| | | SPGERATLSCRASQSVASSFLAWYQQKPGQAPRLLIYGASGRATGIPDRF |
| | | SGSGSGTDFTLTISRLEPEDFAVYYCQHYGGSPRLTFGGGTKVDIK |
| BCMA_EBB- | 8070 | GAAGTCCAACTGGTGGAGTCCGGGGGAGGGCTCGTGCAGCCCGGAGGCAG |
| C1978-G4- nt | | CCTTCGGCTGTCGTGCGCCGCCTCCGGGTTCACGTTCTCATCCTACGCGA |
| ScFv domain | | TGTCGTGGGTCAGACAGGCACCAGGAAAGGGACTGGAATGGGTGTCCGCC |
| | | ATTAGCGGCTCCGGCGGTAGCACCTACTATGCCGACTCAGTGAAGGGAAG |
| | | GTTCACTATCTCCCGCGACAACAGCAAGAACACCCTGTACCTCCAAATGA |
| | | ACTCTCTGCGGGCCGAGGATACCGCGGTGTACTATTGCGCCAAGATGGGT |
| | | TGGTCCAGCGGATACTTGGGAGCCTTCGACATTTGGGGACAGGGCACTAC |
| | | TGTGACCGTGTCCTCCGGGGGTGGCGGATCGGGAGGCGGCGGCTCGGGTG |
| | | GAGGGGGTTCCGAAATCGTGTTGACCCAGTCACCGGGAACCCTCTCGCTG |
| | | TCCCCGGGAGAACGGGCTACACTGTCATGTAGAGCGTCCCAGTCCGTGGC |
| | | TTCCTCGTTCCTGGCCTGGTACCAGCAGAAGCCGGGACAGGCACCCCGCC |
| | | TGCTCATCTACGGAGCCAGCGGCCGGGCGACCGGCATCCCTGACCGCTTC |
| | | TCCGGTTCCGGCTCGGGCACCGACTTTACTCTGACCATTAGCAGGCTTGA |
| | | GCCCGAGGATTTTGCCGTGTACTACTGCCAACACTACGGGGGGAGCCCTC |
| | | GCCTGACCTTCGGAGGCGGAACTAAGGTCGATATCAAAA |
| BCMA_EBB- | 8091 | EVQLVESGGGLVQPGGSLRLSCAASGFTFSSYAMSWVRQAPGKGLEWVSA |
| C1978-G4- aa | | ISGSGGSTYYADSVKGRFTISRDNSKNTLYLQMNSLRAEDTAVYYCAKMG |
| VH | | WSSGYLGAFDIWGQGTTVTVSS |
| BCMA_EBB- | 8112 | EIVLTQSPGTLSLSPGERATLSCRASQSVASSFLAWYQQKPGQAPRLLIY |
| C1978-G4- aa | | GASGRATGIPDRFSGSGSGTDFTLTISRLEPEDFAVYYCQHYGGSPRLTF |
| VL | | GGGTKVDIK |

[0887] In embodiments, additional exemplary BCMA CAR constructs are generated using the VH and VL sequences from PCT Publication WO2012/0163805 (the contents of which are hereby incorporated by reference in its entirety). In embodiments, additional exemplary BCMA CAR constructs are generated using the VH and VL sequences from PCT Publication WO2016/014565 (the contents of which are hereby incorporated by reference in its entirety). In embodiments, additional exemplary BCMA CAR constructs are generated using the VH and VL sequences from PCT Publication WO2014/122144 (the contents of which are hereby incorporated by reference in its entirety). In embodiments, additional exemplary BCMA CAR constructs are generated using the CAR molecules, and/or the VH and VL sequences from PCT Publication WO2016/014789 (the contents of which are hereby incorporated by reference in its entirety). In embodiments, additional exemplary BCMA CAR constructs are generated using the CAR molecules, and/or the VH and VL sequences from PCT Publication WO2014/089335 (the contents of which are hereby incorporated by reference in its entirety). In embodiments, additional exemplary BCMA CAR constructs are generated using the CAR molecules, and/or the VH and VL sequences from PCT Publication WO2014/140248 (the contents of which are hereby incorporated by reference in its entirety).

[0888] In embodiments, additional exemplary BCMA CAR constructs can also be generated using the VH and VL sequences found in Table 19. The amino acid sequences of exemplary scFv domains comprising the VH and VL domains and a linker sequence, and full-length CARs are also found in Table 19.

TABLE 19
Additional exemplary BCMA_binding domain sequences

| | | SEQ ID |
|---|---|---|
| Name | Sequence | NO: |
| A7D12.2 | QIQLVQSGPDLKKPGETVKLSCKASGYTFTNFGMNWVKQAPGKGFKWMAWINTY | 8155 |
| VH | TGESYFADDFKGRFAFSVETSATTAYLQINNLKTEDTATYFCARGEIYYGYDGG | |
| | FAYWGQGTLVTVSA | |
| A7D12.2 | DVVMTQSHRFMSTSVGDRVSITCRASQDVNTAVSWYQQKPGQSPKLLIFSASYR | 8159 |
| VL | YTGVPDRFTGSGSGADFTLTISSVQAEDLAVYYCQQHYSTPWTFGGGTKLDIK | |
| A7D12.2 | QIQLVQSGPDLKKPGETVKLSCKASGYTFTNFGMNWVKQAPGKGFKWMAWINTY | 8163 |
| SCFv | TGESYFADDFKGRFAFSVETSATTAYLQINNLKTEDTATYFCARGEIYYGYDGG | |
| domain | FAYWGQGTLVTVSAGGGGSGGGGSGGGGSDVVMTQSHRFMSTSVGDRVSITCRA | |
| | SQDVNTAVSWYQQKPGQSPKLLIFSASYRYTGVPDRFTGSGSGADFTLTISSVQ | |
| | AEDLAVYYCQQHYSTPWTFGGGTKLDIK | |
| C11D5.3 | QIQLVQSGPELKKPGETVKISCKASGYTFTDYSINWVKRAPGKGLKWMGWINTE | 8156 |
| VH | TREPAYAYDFRGRFAFSLETSASTAYLQINNLKYEDTATYFCALDYSYAMDYWG | |
| | QGTSVTVSS | |
| C11D5.3 | DIVLTQSPASLAMSLGKRATISCRASESVSVIGAHLIHWYQQKPGQPPKLLIYL | 8160 |
| VL | ASNLETGVPARFSGSGSGTDFTLTIDPVEEDDVAIYSCLQSRIFPRTFGGGTKL | |
| | EIK | |
| C11D5.3 | QIQLVQSGPELKKPGETVKISCKASGYTFTDYSINWVKRAPGKGLKWMGWINTE | 8164 |
| ScFv | TREPAYAYDFRGRFAFSLETSASTAYLQINNLKYEDTATYFCALDYSYAMDYWG | |
| domain | QGTSVTVSSGGGGSGGGGSGGGGSQIQLVQSGPELKKPGETVKISCKASGYTFT | |
| | DYSINWVKRAPGKGLKWMGWINTETREPAYAYDFRGRFAFSLETSASTAYLQIN | |
| | NLKYEDTATYFCALDYSYAMDYWGQGTSVTVSS | |
| C12A3.2 | QIQLVQSGPELKKPGETVKISCKASGYTFRHYSMNWVKQAPGKGLKWMGRINTE | 8157 |
| VH | SGVPIYADDFKGRFAFSVETSASTAYLVINNLKDEDTASYFCSNDYLYSLDFWG | |
| | QGTALTVSS | |
| C12A3.2 | DIVLTQSPPSLAMSLGKRATISCRASESVTILGSHLIYWYQQKPGQPPTLLIQL | 8161 |
| VL | ASNVQTGVPARFSGSGSRTDFTLTIDPVEEDDVAVYYCLQSRTIPRTFGGGTKL | |
| | EIK | |
| C12A3.2 | QIQLVQSGPELKKPGETVKISCKASGYTFRHYSMNWVKQAPGKGLKWMGRINTE | 8165 |
| scFv | SGVPIYADDEKGRFAFSVETSASTAYLVINNLKDEDTASYFCSNDYLYSLDFWG | |
| domain | QGTALTVSSGGGGSGGGGSGGGGSDIVLTQSPPSLAMSLGKRATISCRASESVT | |
| | ILGSHLIYWYQQKPGQPPTLLIQLASNVQTGVPARFSGSGSRTDFTLTIDPVEE | |
| | DDVAVYYCLQSRTIPRTFGGGTKLEIK | |
| C13F12.1 | QIQLVQSGPELKKPGETVKISCKASGYTFTHYSMNWVKQAPGKGLKWMGRINTE | 8158 |
| VH | TGEPLYADDFKGRFAFSLETSASTAYLVINNLKNEDTATFFCSNDYLYSCDYWG | |
| | QGTTLTVSS | |
| C13F12.1 | DIVLTQSPPSLAMSLGKRATISCRASESVTILGSHLIYWYQQKPGQPPTLLIQL | 8162 |
| VL | ASNVQTGVPARFSGSGSRTDFTLTIDPVEEDDVAVYYCLQSRTIPRTFGGGTKL | |
| | EIK | |
| C13F12.1 | QIQLVQSGPELKKPGETVKISCKASGYTFTHYSMNWVKQAPGKGLKWMGRINTE | 8166 |
| ScFv | TGEPLYADDFKGRFAFSLETSASTAYLVINNLKNEDTATFFCSNDYLYSCDYWG | |
| domain | QGTTLTVSSGGGGSGGGGSGGGGSDIVLTQSPPSLAMSLGKRATISCRASESVT | |
| | ILGSHLIYWYQQKPGQPPTLLIQLASNVQTGVPARFSGSGSRTDFTLTIDPVEE | |
| | DDVAVYYCLQSRTIPRTFGGGTKLEIK | |

[0889] The sequences of human CDR sequences of the scFv domains are shown in Table 20 for the heavy chain variable domains and in Table 21 for the light chain variable domains. “ID” stands for the respective SEQ ID NO for each CDR. The CDRs are shown according to the Kabat definition, however, the CDRs under other convention, for example, Chothia or the combined Kabat/Chothia definitions may be readily deduced based on the VH and VL sequences above.

TABLE 20
Heavy Chain Variable Domain CDRs according to the Kabat numbering scheme (Kabat et al.
(1991), “Sequences of Proteins of Immunological Interest,” 5th Ed. Public Health Service,
National Institutes of Health, Bethesda, MD)

| Candidate | HCDR1 | ID | HCDR2 | ID | HCDR3 | ID |
|---|---|---|---|---|---|---|
| 139109 | NHGMS | 8294 | GIVYSGSTYYAAS | 8334 | HGGESDV | 8374 |
| | | | VKG | | | |
| 139103 | NYAMS | 8284 | GISRSGENTYYAD | 8324 | SPAHYYGGMDV | 8364 |
| | | | SVKG | | | |
| 139105 | DYAMH | 8285 | GISWNSGSIGYAD | 8325 | HSFLAY | 8365 |
| | | | SVKG | | | |
| 139111 | NHGMS | 8286 | GIVYSGSTYYAAS | 8326 | HGGESDV | 8366 |
| | | | VKG | | | |
| 139100 | NFGIN | 8287 | WINPKNNNTNYA | 8327 | GPYYYQSYMDV | 8367 |
| | | | QKFQG | | | |
| 139101 | SDAMT | 8288 | VISGSGGTTYYA | 8328 | LDSSGYYYARGPR | 8368 |
| | | | DSVKG | | Y | |
| 139102 | NYGIT | 8289 | WISAYNGNTNYA | 8329 | GPYYYYMDV | 8369 |
| | | | QKFQG | | | |
| 139104 | NHGMS | 8290 | GIVYSGSTYYAAS | 8330 | HGGESDV | 8370 |
| | | | VKG | | | |
| 139106 | NHGMS | 8291 | GIVYSGSTYYAAS | 8331 | HGGESDV | 8371 |
| | | | VKG | | | |
| 139107 | NHGMS | 8292 | GIVYSGSTYYAAS | 8332 | HGGESDV | 8372 |
| | | | VKG | | | |
| 139108 | DYYMS | 8293 | YISSSGSTIYYADS | 8333 | ESGDGMDV | 8373 |
| | | | VKG | | | |
| 139110 | DYYMS | 8295 | YISSSGNTIYYAD | 8335 | STMVREDY | 8375 |
| | | | SVKG | | | |
| 139112 | NHGMS | 8296 | GIVYSGSTYYAAS | 8336 | HGGESDV | 8376 |
| | | | VKG | | | |
| 139113 | NHGMS | 8297 | GIVYSGSTYYAAS | 8337 | HGGESDV | 8377 |
| | | | VKG | | | |
| 139114 | NHGMS | 8298 | GIVYSGSTYYAAS | 8338 | HGGESDV | 8378 |
| | | | VKG | | | |
| 149362 | SSYYYW | 8299 | SIYYSGSAYYNPS | 8339 | HWQEWPDAFDI | 8379 |
| | G | | LKS | | | |
| 149363 | TSGMCV | 8300 | RIDWDEDKFYST | 8340 | SGAGGTSATAFDI | 8380 |
| | S | | SLKT | | | |
| 149364 | SYSMN | 8301 | SISSSSSYIYYADS | 8341 | TIAAVYAFDI | 8381 |
| | | | VKG | | | |
| 149365 | DYYMS | 8302 | YISSSGSTIYYADS | 8342 | DLRGAFDI | 8382 |
| | | | VKG | | | |
| 149366 | SHYIH | 8303 | MINPSGGVTAYS | 8343 | EGSGSGWYFDF | 8383 |
| | | | QTLQG | | | |
| 149367 | SGGYY | 8304 | YIYYSGSTYYNPS | 8344 | AGIAARLRGAFDI | 8384 |
| | WS | | LKS | | | |
| 149368 | SYAIS | 8305 | GIIPIFGTANYAQ | 8345 | RGGYQLLRWDVG | 8385 |
| | | | KFQG | | LLRSAFDI | |
| 149369 | SNSAAW | 8306 | RTYYRSKWYSFY | 8346 | SSPEGLFLYWFDP | 8386 |
| | N | | AISLKS | | | |
| BCMA_EBB- | SYAMS | 8307 | AISGSGGSTYYAD | 8347 | VEGSGSLDY | 8387 |
| C1978- | | | SVKG | | | |
| A4 | | | | | | |
| BCMA_EBB- | RYPMS | 8308 | GISDSGVSTYYAD | 8348 | RAGSEASDI | 8388 |
| C1978- | | | SAKG | | | |
| G1 | | | | | | |
| BCMA_EBB- | SYAMS | 8309 | AISGSGGSTYYAD | 8349 | ATYKRELRYYYG | 8389 |
| C1979- | | | SVKG | | MDV | |
| C1 | | | | | | |
| BCMA_EBB- | SYAMS | 8310 | AISGSGGSTYYAD | 8350 | ATYKRELRYYYG | 8390 |
| C1978- | | | SVKG | | MDV | |
| C7 | | | | | | |
| BCMA_EBB- | DYAMH | 8311 | GISWNSGSIGYAD | 8351 | VGKAVPDV | 8391 |
| C1978- | | | SVKG | | | |
| D10 | | | | | | |
| BCMA_EBB- | DYAMH | 8312 | SINWKGNSLAYG | 8352 | HQGVAYYNYAMD | 8392 |
| C1979- | | | DSVKG | | V | |
| C12 | | | | | | |
| BCMA_EBB- | SYAMS | 8313 | AISGSGGSTYYAD | 8353 | VVRDGMDV | 8393 |
| C1980- | | | SVKG | | | |
| G4 | | | | | | |
| BCMA_EBB- | SYAMS | 8314 | AISGSGGSTYYAD | 8354 | IPQTGTFDY | 8394 |
| C1980- | | | SVKG | | | |
| D2 | | | | | | |
| BCMA_EBB- | SYAMS | 8315 | AISGSGGSTYYAD | 8355 | ANYKRELRYYYG | 8395 |
| C1978- | | | SVKG | | MDV | |
| A10 | | | | | | |
| BCMA_EBB- | SYAMS | 8316 | AISGSGGSTYYAD | 8356 | ALVGATGAFDI | 8396 |
| C1978- | | | SVKG | | | |
| D4 | | | | | | |
| BCMA_EBB- | SYAMS | 8317 | AISGSGGSTYYAD | 8357 | WFGEGFDP | 8397 |
| C1980- | | | SVKG | | | |
| A2 | | | | | | |
| BCMA_EBB- | SYAMS | 8318 | AISGSGGSTYYAD | 8358 | VGYDSSGYYRDY | 8398 |
| C1981- | | | SVKG | | YGMDV | |
| C3 | | | | | | |
| BCMA_EBB- | SYAMS | 8319 | AISGSGGSTYYAD | 8359 | MGWSSGYLGAFDI | 8399 |
| C1978- | | | SVKG | | | |
| G4 | | | | | | |
| A7D12.2 | NFGMN | 8320 | WINTYTGESYFA | 8360 | GEIYYGYDGGFAY | 8400 |
| | | | DDFKG | | | |
| C11D5.3 | DYSIN | 8321 | WINTETREPAYA | 8361 | DYSYAMDY | 8401 |
| | | | YDFRG | | | |
| C12A3.2 | HYSMN | 8322 | RINTESGVPIYAD | 8362 | DYLYSLDF | 8402 |
| | | | DFKG | | | |
| C13F12.1 | HYSMN | 8323 | RINTETGEPLYAD | 8363 | DYLYSCDY | 8403 |
| | | | DFKG | | | |

TABLE 21
Light Chain Variable Domain CDRs according to the Kabat numbering scheme (Kabat et al.
(1991), “Sequences of Proteins of Immunological Interest,” 5th Ed. Public Health Service,
National Institutes of Health, Bethesda, MD)

| Candidate | LCDR1 | ID | LCDR2 | ID | LCDR3 | ID |
|---|---|---|---|---|---|---|
| 139109 | RASQSISSYLN | 8414 | AASSLQS | 8454 | QQSYSTPYT | 8494 |
| 139103 | RASQSISSSFLA | 8404 | GASRRAT | 8444 | QQYHSSPSWT | 8484 |
| 139105 | RSSQSLLHSNGYNY | 8405 | LGSNRAS | 8445 | MQALQTPYT | 8485 |
| | LD | | | | | |
| 139111 | KSSQSLLRNDGKTP | 8406 | EVSNRFS | 8446 | MQNIQFPS | 8486 |
| | LY | | | | | |
| 139100 | RSSQSLLHSNGYNY | 8407 | LGSKRAS | 8447 | MQALQTPYT | 8487 |
| | LN | | | | | |
| 139101 | RASQSISSYLN | 8408 | GASTLAS | 8448 | QQSYKRAS | 8488 |
| 139102 | RSSQSLLYSNGYNY | 8409 | LGSNRAS | 8449 | MQGRQFPYS | 8489 |
| | VD | | | | | |
| 139104 | RASQSVSSNLA | 8410 | GASTRAS | 8450 | QQYGSSLT | 8490 |
| 139106 | RASQSVSSKLA | 8411 | GASIRAT | 8451 | QQYGSSSWT | 8491 |
| 139107 | RASQSVGSTNLA | 8412 | DASNRAT | 8452 | QQYGSSPPWT | 8492 |
| 139108 | RASQSISSYLN | 8413 | AASSLQS | 8453 | QQSYTLA | 8493 |
| 139110 | KSSESLVHNSGKTY | 8415 | EVSNRDS | 8455 | MQGTHWPGT | 8495 |
| | LN | | | | | |
| 139112 | QASEDINKFLN | 8416 | DASTLQT | 8456 | QQYESLPLT | 8496 |
| 139113 | RASQSVGSNLA | 8417 | GASTRAT | 8457 | QQYNDWLPVT | 8497 |
| 139114 | RASQSIGSSSLA | 8418 | GASSRAS | 8458 | QQYAGSPPFT | 8498 |
| 149362 | KASQDIDDAMN | 8419 | SATSPVP | 8459 | LQHDNFPLT | 8499 |
| 149363 | RASQDIYNNLA | 8420 | AANKSQS | 8460 | QHYYRFPYS | 8500 |
| 149364 | RSSQSLLHSNGYNY | 8421 | LGSNRAS | 8461 | MQALQTPYT | 8501 |
| | LD | | | | | |
| 149365 | GGNNIGTKSVH | 8422 | DDSVRPS | 8462 | QVWDSDSEHV | 8502 |
| | | | | | V | |
| 149366 | SGDGLSKKYVS | 8423 | RDKERPS | 8463 | QAWDDTTVV | 8503 |
| 149367 | RASQGIRNWLA | 8424 | AASNLQS | 8464 | QKYNSAPFT | 8504 |
| 149368 | GGNNIGSKSVH | 8425 | GKNNRPS | 8465 | SSRDSSGDHLR | 8505 |
| | | | | | V | |
| 149369 | QGDSLGNYYAT | 8426 | GTNNRPS | 8466 | NSRDSSGHHLL | 8506 |
| BCMA_ | RASQSVSSAYLA | 8427 | GASTRAT | 8467 | QHYGSSFNGSS | 8507 |
| EBB- | | | | | LFT | |
| C1978-A4 | | | | | | |
| BCMA_ | RASQSVSNSLA | 8428 | DASSRAT | 8468 | QQFGTSSGLT | 8508 |
| EBB- | | | | | | |
| C1978-G1 | | | | | | |
| BCMA_ | RASQSVSSSFLA | 8429 | GASSRAT | 8469 | QQYHSSPSWT | 8509 |
| EBB- | | | | | | |
| C1979-C1 | | | | | | |
| BCMA_ | RASQSVSTTFLA | 8430 | GSSNRAT | 8470 | QQYHSSPSWT | 8510 |
| EBB- | | | | | | |
| C1978-C7 | | | | | | |
| BCMA_ | RASQSISSYLN | 8431 | AASSLQS | 8471 | QQSYSTPYS | 8511 |
| EBB- | | | | | | |
| C1978- | | | | | | |
| D10 | | | | | | |
| BCMA_ | RATQSIGSSFLA | 8432 | GASQRAT | 8472 | QHYESSPSWT | 8512 |
| EBB- | | | | | | |
| C1979- | | | | | | |
| C12 | | | | | | |
| BCMA_ | RASQSVSSSYLA | 8433 | GASSRAT | 8473 | QQYGSPPRFT | 8513 |
| EBB- | | | | | | |
| C1980-G4 | | | | | | |
| BCMA_ | RASQSVSSSYLA | 8434 | GASSRAT | 8474 | QHYGSSPSWT | 8514 |
| EBB- | | | | | | |
| C1980-D2 | | | | | | |
| BCMA_ | RASQRVASNYLA | 8435 | GASSRAT | 8475 | QHYDSSPSWT | 8515 |
| EBB- | | | | | | |
| C1978- | | | | | | |
| A10 | | | | | | |
| BCMA_ | RASQSLSSNFLA | 8436 | GASNWA | 8476 | QYYGTSPMYT | 8516 |
| EBB- | | | T | | | |
| C1978-D4 | | | | | | |
| BCMA_ | RSSQSLLHSNGYNY | 8437 | LGSNRAS | 8477 | MQALQTPLT | 8517 |
| EBB- | LD | | | | | |
| C1980-A2 | | | | | | |
| BCMA_ | RASQSVSSSYLA | 8438 | GTSSRAT | 8478 | QHYGNSPPKFT | 8518 |
| EBB- | | | | | | |
| C1981-C3 | | | | | | |
| BCMA_ | RASQSVASSFLA | 8439 | GASGRAT | 8479 | QHYGGSPRLT | 8519 |
| EBB- | | | | | | |
| C1978-G4 | | | | | | |
| A7D12.2 | RASQDVNTAVS | 8440 | SASYRYT | 8480 | QQHYSTPWT | 8520 |
| C11D5.3 | RASESVSVIGAHLI | 8441 | LASNLET | 8481 | LQSRIFPRT | 8521 |
| | H | | | | | |
| C12A3.2 | RASESVTILGSHLIY | 8442 | LASNVQT | 8482 | LQSRTIPRT | 8522 |
| C13F12.1 | RASESVTILGSHLIY | 8443 | LASNVQT | 8483 | LQSRTIPRT | 8523 |

[0890] In one embodiment, the BCMA binding domain comprises one or more (e.g., all three) light chain complementary determining region 1 (LC CDR1), light chain complementary determining region 2 (LC CDR2), and light chain complementary determining region 3 (LC CDR3) of a BCMA binding domain described herein, e.g., provided in Table 18, 19 or 21, and/or one or more (e.g., all three) heavy chain complementary determining region 1 (HC CDR1), heavy chain complementary determining region 2 (HC CDR2), and heavy chain complementary determining region 3 (HC CDR3) of a BCMA binding domain described herein, e.g., provided in Table 18, 19 or 20. In one embodiment, the BCMA binding domain comprises one, two, or all of LC CDR1, LC CDR2, and LC CDR3 of any amino acid sequences as provided in Table 18, incorporated herein by reference; and one, two or all of HC CDR1, HC CDR2, and HC CDR3 of any amino acid sequences as provided in Table 18.

[0891] In one embodiment, the BCMA antigen binding domain comprises:
[0892] (i) (a) a LC CDR1 amino acid sequence of SEQ ID NO: 8414, a LC CDR2 amino acid sequence of SEQ ID NO: 8454, and a LC CDR3 amino acid sequence of SEQ ID NO: 8494; and
   [0893] (b) a HC CDR1 amino acid sequence of SEQ ID NO: 8294, a HC CDR2 amino acid sequence of SEQ ID NO: 8334, and a HC CDR3 amino acid sequence of SEQ ID NO: 8374
[0894] (ii) (a) a LC CDR1 amino acid sequence of SEQ ID NO: 8404, a LC CDR2 amino acid sequence of SEQ ID NO: 8444, and a LC CDR3 amino acid sequence of SEQ ID NO: 8484; and
   [0895] (b) a HC CDR1 amino acid sequence of SEQ ID NO: 8284, a HC CDR2 amino acid sequence of SEQ ID NO: 8324, and a HC CDR3 amino acid sequence of SEQ ID NO: 8364
[0896] (iii) (a) a LC CDR1 amino acid sequence of SEQ ID NO: 8405, a LC CDR2 amino acid sequence of SEQ ID NO: 8445, and a LC CDR3 amino acid sequence of SEQ ID NO: 8485; and
   [0897] (b) a HC CDR1 amino acid sequence of SEQ ID NO: 8285, a HC CDR2 amino acid sequence of SEQ ID NO: 8325, and a HC CDR3 amino acid sequence of SEQ ID NO: 8365
[0898] (iv) (a) a LC CDR1 amino acid sequence of SEQ ID NO: 8406, a LC CDR2 amino acid sequence of SEQ ID NO: 8446, and a LC CDR3 amino acid sequence of SEQ ID NO: 8486; and
   [0899] (b) a HC CDR1 amino acid sequence of SEQ ID NO: 8286, a HC CDR2 amino acid sequence of SEQ ID NO: 8326, and a HC CDR3 amino acid sequence of SEQ ID NO: 8366
[0900] (v) (a) a LC CDR1 amino acid sequence of SEQ ID NO: 8407, a LC CDR2 amino acid sequence of SEQ ID NO: 8447, and a LC CDR3 amino acid sequence of SEQ ID NO: 8487; and
   [0901] (b) a HC CDR1 amino acid sequence of SEQ ID NO: 8287, a HC CDR2 amino acid sequence of SEQ ID NO: 8327, and a HC CDR3 amino acid sequence of SEQ ID NO: 8367
[0902] (vi) (a) a LC CDR1 amino acid sequence of SEQ ID NO: 8408, a LC CDR2 amino acid sequence of SEQ ID NO: 8448, and a LC CDR3 amino acid sequence of SEQ ID NO: 8488; and
   [0903] (b) a HC CDR1 amino acid sequence of SEQ ID NO: 8288, a HC CDR2 amino acid sequence of SEQ ID NO: 8328, and a HC CDR3 amino acid sequence of SEQ ID NO: 8368
[0904] (vii) (a) a LC CDR1 amino acid sequence of SEQ ID NO: 8409, a LC CDR2 amino acid sequence of SEQ ID NO: 8449, and a LC CDR3 amino acid sequence of SEQ ID NO: 8489; and
   [0905] (b) a HC CDR1 amino acid sequence of SEQ ID NO: 8289, a HC CDR2 amino acid sequence of SEQ ID NO: 8329, and a HC CDR3 amino acid sequence of SEQ ID NO: 8369
[0906] (viii) (a) a LC CDR1 amino acid sequence of SEQ ID NO: 8410, a LC CDR2 amino acid sequence of SEQ ID NO: 8450, and a LC CDR3 amino acid sequence of SEQ ID NO: 8490; and
   [0907] (b) a HC CDR1 amino acid sequence of SEQ ID NO: 8290, a HC CDR2 amino acid sequence of SEQ ID NO: 8330, and a HC CDR3 amino acid sequence of SEQ ID NO: 8370
[0908] (ix) (a) a LC CDR1 amino acid sequence of SEQ ID NO: 8411, a LC CDR2 amino acid sequence of SEQ ID NO: 8451, and a LC CDR3 amino acid sequence of SEQ ID NO: 8491; and
   [0909] (b) a HC CDR1 amino acid sequence of SEQ ID NO: 8291, a HC CDR2 amino acid sequence of SEQ ID NO: 8331, and a HC CDR3 amino acid sequence of SEQ ID NO: 8371
[0910] (x) (a) a LC CDR1 amino acid sequence of SEQ ID NO: 8412, a LC CDR2 amino acid sequence of SEQ ID NO: 8452, and a LC CDR3 amino acid sequence of SEQ ID NO: 8492; and
   [0911] (b) a HC CDR1 amino acid sequence of SEQ ID NO: 8292, a HC CDR2 amino acid sequence of SEQ ID NO: 8332, and a HC CDR3 amino acid sequence of SEQ ID NO: 8372
[0912] (xi) (a) a LC CDR1 amino acid sequence of SEQ ID NO: 8413, a LC CDR2 amino acid sequence of SEQ ID NO: 8453, and a LC CDR3 amino acid sequence of SEQ ID NO: 8493; and
   [0913] (b) a HC CDR1 amino acid sequence of SEQ ID NO: 8293, a HC CDR2 amino acid sequence of SEQ ID NO: 8333, and a HC CDR3 amino acid sequence of SEQ ID NO: 8373
[0914] (xii) (a) a LC CDR1 amino acid sequence of SEQ ID NO: 8415, a LC CDR2 amino acid sequence of SEQ ID NO: 8455, and a LC CDR3 amino acid sequence of SEQ ID NO: 8495; and
   [0915] (b) a HC CDR1 amino acid sequence of SEQ ID NO: 8295, a HC CDR2 amino acid sequence of SEQ ID NO: 8335, and a HC CDR3 amino acid sequence of SEQ ID NO: 8375
[0916] (xiii) (a) a LC CDR1 amino acid sequence of SEQ ID NO: 8416, a LC CDR2 amino acid sequence of SEQ ID NO: 8456, and a LC CDR3 amino acid sequence of SEQ ID NO: 8496; and
   [0917] (b) a HC CDR1 amino acid sequence of SEQ ID NO: 8296, a HC CDR2 amino acid sequence of SEQ ID NO: 8336, and a HC CDR3 amino acid sequence of SEQ ID NO: 8376
[0918] (xiv) (a) a LC CDR1 amino acid sequence of SEQ ID NO: 8417, a LC CDR2 amino acid sequence of SEQ ID NO: 8457, and a LC CDR3 amino acid sequence of SEQ ID NO: 8497; and
   [0919] (b) a HC CDR1 amino acid sequence of SEQ ID NO: 8297, a HC CDR2 amino acid sequence of SEQ ID NO: 8337, and a HC CDR3 amino acid sequence of SEQ ID NO: 8377
[0920] (xv) (a) a LC CDR1 amino acid sequence of SEQ ID NO: 8418, a LC CDR2 amino acid sequence of SEQ ID NO: 8458, and a LC CDR3 amino acid sequence of SEQ ID NO: 8498; and
   [0921] (b) a HC CDR1 amino acid sequence of SEQ ID NO: 8298, a HC CDR2 amino acid sequence of SEQ ID NO: 8338, and a HC CDR3 amino acid sequence of SEQ ID NO: 8378
[0922] (xvi) (a) a LC CDR1 amino acid sequence of SEQ ID NO: 8419, a LC CDR2 amino acid sequence of SEQ ID NO: 8459, and a LC CDR3 amino acid sequence of SEQ ID NO: 8499; and
   [0923] (b) a HC CDR1 amino acid sequence of SEQ ID NO: 8299, a HC CDR2 amino acid sequence of SEQ ID NO: 8339, and a HC CDR3 amino acid sequence of SEQ ID NO: 8379
[0924] (xvii) (a) a LC CDR1 amino acid sequence of SEQ ID NO: 8420, a LC CDR2 amino acid sequence of SEQ ID NO: 8460, and a LC CDR3 amino acid sequence of SEQ ID NO: 8500; and
   [0925] (b) a HC CDR1 amino acid sequence of SEQ ID NO: 8300, a HC CDR2 amino acid sequence of SEQ ID NO: 8340, and a HC CDR3 amino acid sequence of SEQ ID NO: 8380
[0926] (xviii) (a) a LC CDR1 amino acid sequence of SEQ ID NO: 8421, a LC CDR2 amino acid sequence of SEQ ID NO: 8461, and a LC CDR3 amino acid sequence of SEQ ID NO: 8501; and
   [0927] (b) a HC CDR1 amino acid sequence of SEQ ID NO: 8301, a HC CDR2 amino acid sequence of SEQ ID NO: 8341, and a HC CDR3 amino acid sequence of SEQ ID NO: 8381
[0928] (xix) (a) a LC CDR1 amino acid sequence of SEQ ID NO: 8422, a LC CDR2 amino acid sequence of SEQ ID NO: 8462, and a LC CDR3 amino acid sequence of SEQ ID NO: 8502; and
   [0929] (b) a HC CDR1 amino acid sequence of SEQ ID NO: 8302, a HC CDR2 amino acid sequence of SEQ ID NO: 8342, and a HC CDR3 amino acid sequence of SEQ ID NO: 8382
[0930] (xx) (a) a LC CDR1 amino acid sequence of SEQ ID NO: 8423, a LC CDR2 amino acid sequence of SEQ ID NO: 8463, and a LC CDR3 amino acid sequence of SEQ ID NO: 8503; and
   [0931] (b) a HC CDR1 amino acid sequence of SEQ ID NO: 8303, a HC CDR2 amino acid sequence of SEQ ID NO: 8343, and a HC CDR3 amino acid sequence of SEQ ID NO: 8383
[0932] (xxi) (a) a LC CDR1 amino acid sequence of SEQ ID NO: 8424, a LC CDR2 amino acid sequence of SEQ ID NO: 8464, and a LC CDR3 amino acid sequence of SEQ ID NO: 8504; and
   [0933] (b) a HC CDR1 amino acid sequence of SEQ ID NO: 8304, a HC CDR2 amino acid sequence of SEQ ID NO: 8344, and a HC CDR3 amino acid sequence of SEQ ID NO: 8384
[0934] (xxii) (a) a LC CDR1 amino acid sequence of SEQ ID NO: 8425, a LC CDR2 amino acid sequence of SEQ ID NO: 8465, and a LC CDR3 amino acid sequence of SEQ ID NO: 8505; and
   [0935] (b) a HC CDR1 amino acid sequence of SEQ ID NO: 8305, a HC CDR2 amino acid sequence of SEQ ID NO: 8345, and a HC CDR3 amino acid sequence of SEQ ID NO: 8385 or
[0936] (xxiii) (a) a LC CDR1 amino acid sequence of SEQ ID NO: 8426, a LC CDR2 amino acid sequence of SEQ ID NO: 8466, and a LC CDR3 amino acid sequence of SEQ ID NO: 8506; and
   [0937] (b) a HC CDR1 amino acid sequence of SEQ ID NO: 8306, a HC CDR2 amino acid sequence of SEQ ID NO: 8346, and a HC CDR3 amino acid sequence of SEQ ID NO: 8386.

[0938] In one embodiment, the BCMA binding domain comprises a light chain variable region described herein (e.g., in Table 18 or 19) and/or a heavy chain variable region described herein (e.g., in Table 18 or 19). In one embodiment, the BCMA binding domain is a scFv comprising a light chain and a heavy chain of an amino acid sequence listed in Table 18 or 19. In an embodiment, the BCMA binding domain (e.g., an scFv) comprises: a light chain variable region comprising an amino acid sequence having at least one, two or three modifications (e.g., substitutions, e.g., conservative substitutions) but not more than 30, 20 or 10 modifications (e.g., substitutions, e.g., conservative substitutions) of an amino acid sequence of a light chain variable region provided in Table 18 or 19, or a sequence with 95-99% identity with an amino acid sequence provided in Table 18 or 19; and/or a heavy chain variable region comprising an amino acid sequence having at least one, two or three modifications (e.g., substitutions, e.g., conservative substitutions) but not more than 30, 20 or 10 modifications (e.g., substitutions, e.g., conservative substitutions) of an amino acid sequence of a heavy chain variable region provided in Table 18 or 19, or a sequence with 95-99% identity to an amino acid sequence provided in Table 18 or 19.

[0939] In one embodiment, the BCMA binding domain comprises an amino acid sequence selected from a group consisting of SEQ ID NO: 7949; SEQ ID NO: 7939, SEQ ID NO: 7940; SEQ ID NO: 7941; SEQ ID NO: 7942; SEQ ID NO: 7943; SEQ ID NO: 7944, SEQ ID NO: 7945, SEQ ID NO: 7946, SEQ ID NO: 7947, SEQ ID NO: 7948, SEQ ID NO: 7950, SEQ ID NO: 7951, SEQ ID NO: 7952, SEQ ID NO: 7953, SEQ ID NO: 8029, SEQ ID NO: 8030, SEQ ID NO: 8031, SEQ ID NO: 8032, SEQ ID NO: 8033, SEQ ID NO: 8034, SEQ ID NO: 8035, SEQ ID NO: 8036, SEQ ID NO: 8037, SEQ ID NO: 8038, SEQ ID NO: 8039, SEQ ID NO: 8040, SEQ ID NO: 8041, SEQ ID NO: 8042, SEQ ID NO: 8043, SEQ ID NO: 8044, SEQ ID NO: 8045, SEQ ID NO: 8046, SEQ ID NO: 8047, SEQ ID NO: 8048, SEQ ID NO: 8049, SEQ ID NO: 8163, SEQ ID NO: 8164, SEQ ID NO: 8165 and SEQ ID NO: 8166; or an amino acid sequence having at least one, two or three modifications (e.g., substitutions, e.g., conservative substitutions) but not more than 30, 20 or 10 modifications (e.g., substitutions, e.g., conservative substitutions) to any of the aforesaid sequences; or a sequence with 95-99% identity to any of the aforesaid sequences. In one embodiment, the BCMA binding domain is a scFv, and a light chain variable region comprising an amino acid sequence described herein, e.g., in Table 18 or 19, is attached to a heavy chain variable region comprising an amino acid sequence described herein, e.g., in Table 18 or 19, via a linker, e.g., a linker described herein. In one embodiment, the BCMA binding domain includes a (Gly4-Ser)n linker, wherein n is 1, 2, 3, 4, 5, or 6, preferably 3 (SEQ ID NO: 10801). The light chain variable region and heavy chain variable region of a scFv can be, e.g., in any of the following orientations: light chain variable region-linker-heavy chain variable region or heavy chain variable region-linker-light chain variable region.

[0940] Any known BCMA CAR, e.g., the BMCA antigen binding domain of any known BCMA CAR, in the art can be used in accordance with the instant invention. For example, those described herein.

### Exemplary CAR Molecules

[0941] In one aspect, a CAR, e.g., a CAR expressed by the cell of the invention, comprises a CAR molecule comprising an antigen binding domain that binds to a B cell antigen, e.g., as described herein, such as CD19 or BCMA.

[0942] In one embodiment, the CAR comprises a CAR molecule comprising a CD19 antigen binding domain (e.g., a murine, human or humanized antibody or antibody fragment that specifically binds to CD19), a transmembrane domain, and an intracellular signaling domain (e.g., an intracellular signaling domain comprising a costimulatory domain and/or a primary signaling domain).

[0943] Exemplary CAR molecules described herein are provided in Table 22. The CAR molecules in Table 22 comprise a CD19 antigen binding domain, e.g., an amino acid sequence of any CD19 antigen binding domain provided in Table 14.

TABLE 22
Exemplary CD19 CAR molecules

| | | | SEQ |
|---|---|---|---|
| | | | ID |
| Antigen | Name | Amino Acid Sequence | NO: |
| CD19 | CTL019 | MALPVTALLLPLALLLHAARPDIQMTQTTSSLSASLGDRVTISCRASQ | 7920 |
| | | DISKYLNWYQQKPDGTVKLLIYHTSRLHSGVPSRFSGSGSGTDYSLTI | |
| | | SNLEQEDIATYFCQQGNTLPYTFGGGTKLEITGGGGSGGGGSGGGGSE | |
| | | VKLQESGPGLVAPSQSLSVTCTVSGVSLPDYGVSWIRQPPRKGLEWLG | |
| | | VIWGSETTYYNSALKSRLTIIKDNSKSQVFLKMNSLQTDDTAIYYCAK | |
| | | HYYYGGSYAMDYWGQGTSVTVSSTTTPAPRPPTPAPTIASQPLSLRPE | |
| | | ACRPAAGGAVHTRGLDFACDIYIWAPLAGTCGVLLLSLVITLYCKRGR | |
| | | KKLLYIFKQPFMRPVQTTQEEDGCSCRFPEEEEGGCELRVKFSRSADA | |
| | | PAYKQGQNQLYNELNLGRREEYDVLDKRRGRDPEMGGKPRRKNPQEGL | |
| | | YNELQKDKMAEAYSEIGMKGERRRGKGHDGLYQGLSTATKDTYDALHM | |
| | | QALPPR | |
| CD19 | CAR 1 | MALPVTALLLPLALLLHAARPEIVMTQSPATLSLSPGERATLSCRASQ | 7908 |
| | | DISKYLNWYQQKPGQAPRLLIYHTSRLHSGIPARFSGSGSGTDYTLTI | |
| | | SSLQPEDFAVYFCQQGNTLPYTFGQGTKLEIKGGGGSGGGGSGGGGSQ | |
| | | VQLQESGPGLVKPSETLSLTCTVSGVSLPDYGVSWIRQPPGKGLEWIG | |
| | | VIWGSETTYYSSSLKSRVTISKDNSKNQVSLKLSSVTAADTAVYYCAK | |
| | | HYYYGGSYAMDYWGQGTLVTVSSTTTPAPRPPTPAPTIASQPLSLRPE | |
| | | ACRPAAGGAVHTRGLDFACDIYIWAPLAGTCGVLLLSLVITLYCKRGR | |
| | | KKLLYIFKQPFMRPVQTTQEEDGCSCRFPEEEEGGCELRVKFSRSADA | |
| | | PAYKQGQNQLYNELNLGRREEYDVLDKRRGRDPEMGGKPRRKNPQEGL | |
| | | YNELQKDKMAEAYSEIGMKGERRRGKGHDGLYQGLSTATKDTYDALHM | |
| | | QALPPR | |
| CD19 | CAR 2 | MALPVTALLLPLALLLHAARPEIVMTQSPATLSLSPGERATLSCRASQ | 7909 |
| | | DISKYLNWYQQKPGQAPRLLIYHTSRLHSGIPARFSGSGSGTDYTLTI | |
| | | SSLQPEDFAVYFCQQGNTLPYTFGQGTKLEIKGGGGSGGGGSGGGGSQ | |
| | | VQLQESGPGLVKPSETLSLTCTVSGVSLPDYGVSWIRQPPGKGLEWIG | |
| | | VIWGSETTYYQSSLKSRVTISKDNSKNQVSLKLSSVTAADTAVYYCAK | |
| | | HYYYGGSYAMDYWGQGTLVTVSSTTTPAPRPPTPAPTIASQPLSLRPE | |
| | | ACRPAAGGAVHTRGLDFACDIYIWAPLAGTCGVLLLSLVITLYCKRGR | |
| | | KKLLYIFKQPFMRPVQTTQEEDGCSCRFPEEEEGGCELRVKFSRSADA | |
| | | PAYKQGQNQLYNELNLGRREEYDVLDKRRGRDPEMGGKPRRKNPQEGL | |
| | | YNELQKDKMAEAYSEIGMKGERRRGKGHDGLYQGLSTATKDTYDALHM | |
| | | QALPPR | |
| CD19 | CAR 3 | MALPVTALLLPLALLLHAARPQVQLQESGPGLVKPSETLSLTCTVSGV | 7910 |
| | | SLPDYGVSWIRQPPGKGLEWIGVIWGSETTYYSSSLKSRVTISKDNSK | |
| | | NQVSLKLSSVTAADTAVYYCAKHYYYGGSYAMDYWGQGTLVTVSSGGG | |
| | | GSGGGGSGGGGSEIVMTQSPATLSLSPGERATLSCRASQDISKYLNWY | |
| | | QQKPGQAPRLLIYHTSRLHSGIPARFSGSGSGTDYTLTISSLQPEDFA | |
| | | VYFCQQGNTLPYTFGQGTKLEIKTTTPAPRPPTPAPTIASQPLSLRPE | |
| | | ACRPAAGGAVHTRGLDFACDIYIWAPLAGTCGVLLLSLVITLYCKRGR | |
| | | KKLLYIFKQPFMRPVQTTQEEDGCSCRFPEEEEGGCELRVKESRSADA | |
| | | PAYKQGQNQLYNELNLGRREEYDVLDKRRGRDPEMGGKPRRKNPQEGL | |
| | | YNELQKDKMAEAYSEIGMKGERRRGKGHDGLYQGLSTATKDTYDALHM | |
| | | QALPPR | |
| CD19 | CAR 4 | MALPVTALLLPLALLLHAARPQVQLQESGPGLVKPSETLSLTCTVSGV | 7911 |
| | | SLPDYGVSWIRQPPGKGLEWIGVIWGSETTYYQSSLKSRVTISKDNSK | |
| | | NQVSLKLSSVTAADTAVYYCAKHYYYGGSYAMDYWGQGTLVTVSSGGG | |
| | | GSGGGGSGGGGSEIVMTQSPATLSLSPGERATLSCRASQDISKYLNWY | |
| | | QQKPGQAPRLLIYHTSRLHSGIPARFSGSGSGTDYTLTISSLQPEDFA | |
| | | VYFCQQGNTLPYTFGQGTKLEIKTTTPAPRPPTPAPTIASQPLSLRPE | |
| | | ACRPAAGGAVHTRGLDFACDIYIWAPLAGTCGVLLLSLVITLYCKRGR | |
| | | KKLLYIFKQPFMRPVQTTQEEDGCSCRFPEEEEGGCELRVKFSRSADA | |
| | | PAYKQGQNQLYNELNLGRREEYDVLDKRRGRDPEMGGKPRRKNPQEGL | |
| | | YNELQKDKMAEAYSEIGMKGERRRGKGHDGLYQGLSTATKDTYDALHM | |
| | | QALPPR | |
| CD19 | CAR 5 | MALPVTALLLPLALLLHAARPEIVMTQSPATLSLSPGERATLSCRASQ | 7912 |
| | | DISKYLNWYQQKPGQAPRLLIYHTSRLHSGIPARFSGSGSGTDYTLTI | |
| | | SSLQPEDFAVYFCQQGNTLPYTFGQGTKLEIKGGGGSGGGGSGGGGSG | |
| | | GGGSQVQLQESGPGLVKPSETLSLTCTVSGVSLPDYGVSWIRQPPGKG | |
| | | LEWIGVIWGSETTYYSSSLKSRVTISKDNSKNQVSLKLSSVTAADTAV | |
| | | YYCAKHYYYGGSYAMDYWGQGTLVTVSSTTTPAPRPPTPAPTIASQPL | |
| | | SLRPEACRPAAGGAVHTRGLDFACDIYIWAPLAGTCGVLLLSLVITLY | |
| | | CKRGRKKLLYIFKQPFMRPVQTTQEEDGCSCRFPEEEEGGCELRVKFS | |
| | | RSADAPAYKQGQNQLYNELNLGRREEYDVLDKRRGRDPEMGGKPRRKN | |
| | | PQEGLYNELQKDKMAEAYSEIGMKGERRRGKGHDGLYQGLSTATKDTY | |
| | | DALHMQALPPR | |
| CD19 | CAR 6 | MALPVTALLLPLALLLHAARPEIVMTQSPATLSLSPGERATLSCRASQ | 7913 |
| | | DISKYLNWYQQKPGQAPRLLIYHTSRLHSGIPARFSGSGSGTDYTLTI | |
| | | SSLQPEDFAVYFCQQGNTLPYTFGQGTKLEIKGGGGSGGGGSGGGGSG | |
| | | GGGSQVQLQESGPGLVKPSETLSLTCTVSGVSLPDYGVSWIRQPPGKG | |
| | | LEWIGVIWGSETTYYQSSLKSRVTISKDNSKNQVSLKLSSVTAADTAV | |
| | | YYCAKHYYYGGSYAMDYWGQGTLVTVSSTTTPAPRPPTPAPTIASQPL | |
| | | SLRPEACRPAAGGAVHTRGLDFACDIYIWAPLAGTCGVLLLSLVITLY | |
| | | CKRGRKKLLYIFKQPFMRPVQTTQEEDGCSCRFPEEEEGGCELRVKFS | |
| | | RSADAPAYKQGQNQLYNELNLGRREEYDVLDKRRGRDPEMGGKPRRKN | |
| | | PQEGLYNELQKDKMAEAYSEIGMKGERRRGKGHDGLYQGLSTATKDTY | |
| | | DALHMQALPPR | |
| CD19 | CAR 7 | MALPVTALLLPLALLLHAARPQVQLQESGPGLVKPSETLSLTCTVSGV | 7914 |
| | | SLPDYGVSWIRQPPGKGLEWIGVIWGSETTYYSSSLKSRVTISKDNSK | |
| | | NQVSLKLSSVTAADTAVYYCAKHYYYGGSYAMDYWGQGTLVTVSSGGG | |
| | | GSGGGGSGGGGSGGGGSEIVMTQSPATLSLSPGERATLSCRASQDISK | |
| | | YLNWYQQKPGQAPRLLIYHTSRLHSGIPARFSGSGSGTDYTLTISSLQ | |
| | | PEDFAVYFCQQGNTLPYTFGQGTKLEIKTTTPAPRPPTPAPTIASQPL | |
| | | SLRPEACRPAAGGAVHTRGLDFACDIYIWAPLAGTCGVLLLSLVITLY | |
| | | CKRGRKKLLYIFKQPFMRPVQTTQEEDGCSCRFPEEEEGGCELRVKFS | |
| | | RSADAPAYKQGQNQLYNELNLGRREEYDVLDKRRGRDPEMGGKPRRKN | |
| | | PQEGLYNELQKDKMAEAYSEIGMKGERRRGKGHDGLYQGLSTATKDTY | |
| | | DALHMQALPPR | |
| CD19 | CAR 8 | MALPVTALLLPLALLLHAARPQVQLQESGPGLVKPSETLSLTCTVSGV | 7915 |
| | | SLPDYGVSWIRQPPGKGLEWIGVIWGSETTYYQSSLKSRVTISKDNSK | |
| | | NQVSLKLSSVTAADTAVYYCAKHYYYGGSYAMDYWGQGTLVTVSSGGG | |
| | | GSGGGGSGGGGSGGGGSEIVMTQSPATLSLSPGERATLSCRASQDISK | |
| | | YLNWYQQKPGQAPRLLIYHTSRLHSGIPARFSGSGSGTDYTLTISSLQ | |
| | | PEDFAVYFCQQGNTLPYTFGQGTKLEIKTTTPAPRPPTPAPTIASQPL | |
| | | SLRPEACRPAAGGAVHTRGLDFACDIYIWAPLAGTCGVLLLSLVITLY | |
| | | CKRGRKKLLYIFKQPFMRPVQTTQEEDGCSCRFPEEEEGGCELRVKFS | |
| | | RSADAPAYKQGQNQLYNELNLGRREEYDVLDKRRGRDPEMGGKPRRKN | |
| | | PQEGLYNELQKDKMAEAYSEIGMKGERRRGKGHDGLYQGLSTATKDTY | |
| | | DALHMQALPPR | |
| CD19 | CAR 9 | MALPVTALLLPLALLLHAARPEIVMTQSPATLSLSPGERATLSCRASQ | 7916 |
| | | DISKYLNWYQQKPGQAPRLLIYHTSRLHSGIPARFSGSGSGTDYTLTI | |
| | | SSLQPEDFAVYFCQQGNTLPYTFGQGTKLEIKGGGGSGGGGSGGGGSG | |
| | | GGGSQVQLQESGPGLVKPSETLSLTCTVSGVSLPDYGVSWIRQPPGKG | |
| | | LEWIGVIWGSETTYYNSSLKSRVTISKDNSKNQVSLKLSSVTAADTAV | |
| | | YYCAKHYYYGGSYAMDYWGQGTLVTVSSTTTPAPRPPTPAPTIASQPL | |
| | | SLRPEACRPAAGGAVHTRGLDFACDIYIWAPLAGTCGVLLLSLVITLY | |
| | | CKRGRKKLLYIFKQPFMRPVQTTQEEDGCSCRFPEEEEGGCELRVKFS | |
| | | RSADAPAYKQGQNQLYNELNLGRREEYDVLDKRRGRDPEMGGKPRRKN | |
| | | PQEGLYNELQKDKMAEAYSEIGMKGERRRGKGHDGLYQGLSTATKDTY | |
| | | DALHMQALPPR | |
| CD19 | CAR 10 | MALPVTALLLPLALLLHAARPEIVMTQSPATLSLSPGERATLSCRASQ | 7917 |
| | | DISKYLNWYQQKPGQAPRLLIYHTSRLHSGIPARFSGSGSGTDYTLTI | |
| | | SSLQPEDFAVYFCQQGNTLPYTFGQGTKLEIKGGGGSGGGGSGGGGSG | |
| | | GGGSQVQLQESGPGLVKPSETLSLTCTVSGVSLPDYGVSWIRQPPGKG | |
| | | LEWIGVIWGSETTYYNSSLKSRVTISKDNSKNQVSLKLSSVTAADTAV | |
| | | YYCAKHYYYGGSYAMDYWGQGTLVTVSSTTTPAPRPPTPAPTIASQPL | |
| | | SLRPEACRPAAGGAVHTRGLDFACDIYIWAPLAGTCGVLLLSLVITLY | |
| | | CKRGRKKLLYIFKQPFMRPVQTTQEEDGCSCRFPEEEEGGCELRVKFS | |
| | | RSADAPAYKQGQNQLYNELNLGRREEYDVLDKRRGRDPEMGGKPRRKN | |
| | | PQEGLYNELQKDKMAEAYSEIGMKGERRRGKGHDGLYQGLSTATKDTY | |
| | | DALHMQALPPR | |
| CD19 | CAR 11 | MALPVTALLLPLALLLHAARPQVQLQESGPGLVKPSETLSLTCTVSGV | 7918 |
| | | SLPDYGVSWIRQPPGKGLEWIGVIWGSETTYYNSSLKSRVTISKDNSK | |
| | | NQVSLKLSSVTAADTAVYYCAKHYYYGGSYAMDYWGQGTLVTVSSGGG | |
| | | GSGGGGSGGGGSGGGGSEIVMTQSPATLSLSPGERATLSCRASQDISK | |
| | | YLNWYQQKPGQAPRLLIYHTSRLHSGIPARFSGSGSGTDYTLTISSLQ | |
| | | PEDFAVYFCQQGNTLPYTFGQGTKLEIKTTTPAPRPPTPAPTIASQPL | |
| | | SLRPEACRPAAGGAVHTRGLDFACDIYIWAPLAGTCGVLLLSLVITLY | |
| | | CKRGRKKLLYIFKQPFMRPVQTTQEEDGCSCRFPEEEEGGCELRVKFS | |
| | | RSADAPAYKQGQNQLYNELNLGRREEYDVLDKRRGRDPEMGGKPRRKN | |
| | | PQEGLYNELQKDKMAEAYSEIGMKGERRRGKGHDGLYQGLSTATKDTY | |
| | | DALHMQALPPR | |
| CD19 | CAR 12 | MALPVTALLLPLALLLHAARPEIVMTQSPATLSLSPGERATLSCRASQ | 7919 |
| | | DISKYLNWYQQKPGQAPRLLIYHTSRLHSGIPARFSGSGSGTDYTLTI | |
| | | SSLQPEDFAVYFCQQGNTLPYTFGQGTKLEIKGGGGSGGGGSGGGGSQ | |
| | | VQLQESGPGLVKPSETLSLTCTVSGVSLPDYGVSWIRQPPGKGLEWIG | |
| | | VIWGSETTYYNSSLKSRVTISKDNSKNQVSLKLSSVTAADTAVYYCAK | |
| | | HYYYGGSYAMDYWGQGTLVTVSSTTTPAPRPPTPAPTIASQPLSLRPE | |
| | | ACRPAAGGAVHTRGLDFACDIYIWAPLAGTCGVLLLSLVITLYCKRGR | |
| | | KKLLYIFKQPFMRPVQTTQEEDGCSCRFPEEEEGGCELRVKFSRSADA | |
| | | PAYKQGQNQLYNELNLGRREEYDVLDKRRGRDPEMGGKPRRKNPQEGL | |
| | | YNELQKDKMAEAYSEIGMKGERRRGKGHDGLYQGLSTATKDTYDALHM | |
| | | QALPPR | |

[0944] In one embodiment, the CAR molecule comprises (e.g., consists of) an amino acid sequence as provided in Table 22, or in Table 3 of International Publication No. WO2014/153270, filed Mar. 15, 2014; incorporated herein by reference. In one embodiment, the CAR molecule comprises (e.g., consists of) an amino acid sequence of SEQ ID NO: 7908, SEQ ID NO: 7909, SEQ ID NO: 7910, SEQ ID NO: 7911, SEQ ID NO: 7912, SEQ ID NO: 7913, SEQ ID NO: 7914, SEQ ID NO: 7915, SEQ ID NO: 7916, SEQ ID NO: 7917, SEQ ID NO: 7918, SEQ ID NO: 7919, or SEQ ID NO: 7920; or an amino acid sequence having at least one, two, three, four, five, 10, 15, 20 or 30 modifications (e.g., substitutions, e.g., conservative substitutions) but not more than 60, 50, or 40 modifications (e.g., substitutions, e.g., conservative substitutions) of an amino acid sequence of SEQ ID NO: 7908, SEQ ID NO: 7909, SEQ ID NO: 7910, SEQ ID NO: 7911, SEQ ID NO: 7912, SEQ ID NO: 7913, SEQ ID NO: 7914, SEQ ID NO: 7915, SEQ ID NO: 7916, SEQ ID NO: 7917, SEQ ID NO: 7918, SEQ ID NO: 7919, or SEQ ID NO: 7920; or an amino acid sequence having 85%, 90%, 95%, 96%, 97%, 98%, 99% identity to an amino acid sequence of SEQ ID NO: 7908, SEQ ID NO: 7909, SEQ ID NO: 7910, SEQ ID NO: 7911, SEQ ID NO: 7912, SEQ ID NO: 7913, SEQ ID NO: 7914, SEQ ID NO: 7915, SEQ ID NO: 7916, SEQ ID NO: 7917, SEQ ID NO: 7918, SEQ ID NO: 7919, or SEQ ID NO: 7920.

[0945] In one aspect, a CAR, e.g., a CAR expressed by the cell of the invention, comprises a CAR molecule comprising an antigen binding domain that binds to BCMA, e.g., comprises a BCMA antigen binding domain (e.g., a murine, human or humanized antibody or antibody fragment that specifically binds to BCMA, e.g., human BCMA), a transmembrane domain, and an intracellular signaling domain (e.g., an intracellular signaling domain comprising a costimulatory domain and/or a primary signaling domain).

[0946] Exemplary CAR molecules of a CAR described herein are provided in Table 23, or Table 1 of WO2016/014565, or as otherwise described herein. The CAR molecules in Table 23 comprise a BCMA antigen binding domain, e.g., an amino acid sequence of any BCMA antigen binding domain provided in Table 18 or 19.

TABLE 23
Exemplary BCMA_CAR molecules. Sequences are provided with a leader sequence.

| | | |
|---|---|---|
| | SEQ | |
| Name/ | ID | |
| Description | NO: | Sequence |

139109

| | | |
|---|---|---|
| 139109- aa | 8559 | MALPVTALLLPLALLLHAARPEVQLVESGGGLVQPGGSLRLSCAVSGFALS |
| Full CAR | | NHGMSWVRRAPGKGLEWVSGIVYSGSTYYAASVKGRFTISRDNSRNTLYLQ |
| | | MNSLRPEDTAIYYCSAHGGESDVWGQGTTVTVSSASGGGGSGGRASGGGGS |
| | | DIQLTQSPSSLSASVGDRVTITCRASQSISSYLNWYQQKPGKAPKLLIYAA |
| | | SSLQSGVPSRFSGSGSGTDFTLTISSLQPEDFATYYCQQSYSTPYTFGQGT |
| | | KVEIKTTTPAPRPPTPAPTIASQPLSLRPEACRPAAGGAVHTRGLDFACDI |
| | | YIWAPLAGTCGVLLLSLVITLYCKRGRKKLLYIFKQPFMRPVQTTQEEDGC |
| | | SCRFPEEEEGGCELRVKFSRSADAPAYKQGQNQLYNELNLGRREEYDVLDK |
| | | RRGRDPEMGGKPRRKNPQEGLYNELQKDKMAEAYSEIGMKGERRRGKGHDG |
| | | LYQGLSTATKDTYDALHMQALPPR |
| 139109- nt | 8574 | ATGGCCCTCCCTGTCACCGCCCTGCTGCTTCCGCTGGCTCTTCTGCTCCAC |
| Full CAR | | GCCGCTCGGCCCGAAGTGCAATTGGTGGAATCAGGGGGAGGACTTGTGCAG |
| | | CCTGGAGGATCGCTGAGACTGTCATGTGCCGTGTCCGGCTTTGCCCTGTCC |
| | | AACCACGGGATGTCCTGGGTCCGCCGCGCGCCTGGAAAGGGCCTCGAATGG |
| | | GTGTCGGGTATTGTGTACAGCGGTAGCACCTACTATGCCGCATCCGTGAAG |
| | | GGGAGATTCACCATCAGCCGGGACAACTCCAGGAACACTCTGTACCTCCAA |
| | | ATGAATTCGCTGAGGCCAGAGGACACTGCCATCTACTACTGCTCCGCGCAT |
| | | GGCGGAGAGTCCGACGTCTGGGGACAGGGGACCACCGTGACCGTGTCTAGC |
| | | GCGTCCGGCGGAGGCGGCAGCGGGGGTCGGGCATCAGGGGGCGGCGGATCG |
| | | GACATCCAGCTCACCCAGTCCCCGAGCTCGCTGTCCGCCTCCGTGGGAGAT |
| | | CGGGTCACCATCACGTGCCGCGCCAGCCAGTCGATTTCCTCCTACCTGAAC |
| | | TGGTACCAACAGAAGCCCGGAAAAGCCCCGAAGCTTCTCATCTACGCCGCC |
| | | TCGAGCCTGCAGTCAGGAGTGCCCTCACGGTTCTCCGGCTCCGGTTCCGGT |
| | | ACTGATTTCACCCTGACCATTTCCTCCCTGCAACCGGAGGACTTCGCTACT |
| | | TACTACTGCCAGCAGTCGTACTCCACCCCCTACACTTTCGGACAAGGCACC |
| | | AAGGTCGAAATCAAGACCACTACCCCAGCACCGAGGCCACCCACCCCGGCT |
| | | CCTACCATCGCCTCCCAGCCTCTGTCCCTGCGTCCGGAGGCATGTAGACCC |
| | | GCAGCTGGTGGGGCCGTGCATACCCGGGGTCTTGACTTCGCCTGCGATATC |
| | | TACATTTGGGCCCCTCTGGCTGGTACTTGCGGGGTCCTGCTGCTTTCACTC |
| | | GTGATCACTCTTTACTGTAAGCGCGGTCGGAAGAAGCTGCTGTACATCTTT |
| | | AAGCAACCCTTCATGAGGCCTGTGCAGACTACTCAAGAGGAGGACGGCTGT |
| | | TCATGCCGGTTCCCAGAGGAGGAGGAAGGCGGCTGCGAACTGCGCGTGAAA |
| | | TTCAGCCGCAGCGCAGATGCTCCAGCCTACAAGCAGGGGCAGAACCAGCTC |
| | | TACAACGAACTCAATCTTGGTCGGAGAGAGGAGTACGACGTGCTGGACAAG |
| | | CGGAGAGGACGGGACCCAGAAATGGGCGGGAAGCCGCGCAGAAAGAATCCC |
| | | CAAGAGGGCCTGTACAACGAGCTCCAAAAGGATAAGATGGCAGAAGCCTAT |
| | | AGCGAGATTGGTATGAAAGGGGAACGCAGAAGAGGCAAAGGCCACGACGGA |
| | | CTGTACCAGGGACTCAGCACCGCCACCAAGGACACCTATGACGCTCTTCAC |
| | | ATGCAGGCCCTGCCGCCTCGG |

139103

| | | |
|---|---|---|
| 139103- aa | 8549 | MALPVTALLLPLALLLHAARPQVQLVESGGGLVQPGRSLRLSCAASGFTFS |
| Full CAR | | NYAMSWVRQAPGKGLGWVSGISRSGENTYYADSVKGRFTISRDNSKNTLYL |
| | | QMNSLRDEDTAVYYCARSPAHYYGGMDVWGQGTTVTVSSASGGGGSGGRAS |
| | | GGGGSDIVLTQSPGTLSLSPGERATLSCRASQSISSSFLAWYQQKPGQAPR |
| | | LLIYGASRRATGIPDRFSGSGSGTDFTLTISRLEPEDSAVYYCQQYHSSPS |
| | | WTFGQGTKLEIKTTTPAPRPPTPAPTIASQPLSLRPEACRPAAGGAVHTRG |
| | | LDFACDIYIWAPLAGTCGVLLLSLVITLYCKRGRKKLLYIFKQPFMRPVQT |
| | | TQEEDGCSCRFPEEEEGGCELRVKFSRSADAPAYKQGQNQLYNELNLGRRE |
| | | EYDVLDKRRGRDPEMGGKPRRKNPQEGLYNELQKDKMAEAYSEIGMKGERR |
| | | RGKGHDGLYQGLSTATKDTYDALHMQALPPR |
| 139103- nt | 8564 | ATGGCCCTCCCTGTCACCGCCCTGCTGCTTCCGCTGGCTCTTCTGCTCCAC |
| Full CAR | | GCCGCTCGGCCCCAAGTGCAACTCGTGGAATCTGGTGGAGGACTCGTGCAA |
| | | CCCGGAAGATCGCTTAGACTGTCGTGTGCCGCCAGCGGGTTCACTTTCTCG |
| | | AACTACGCGATGTCCTGGGTCCGCCAGGCACCCGGAAAGGGACTCGGTTGG |
| | | GTGTCCGGCATTTCCCGGTCCGGCGAAAATACCTACTACGCCGACTCCGTG |
| | | AAGGGCCGCTTCACCATCTCAAGGGACAACAGCAAAAACACCCTGTACTTG |
| | | CAAATGAACTCCCTGCGGGATGAAGATACAGCCGTGTACTATTGCGCCCGG |
| | | TCGCCTGCCCATTACTACGGCGGAATGGACGTCTGGGGACAGGGAACCACT |
| | | GTGACTGTCAGCAGCGCGTCGGGTGGCGGCGGCTCAGGGGGTCGGGCCTCC |
| | | GGGGGGGGAGGGTCCGACATCGTGCTGACCCAGTCCCCGGGAACCCTGAGC |
| | | CTGAGCCCGGGAGAGCGCGCGACCCTGTCATGCCGGGCATCCCAGAGCATT |
| | | AGCTCCTCCTTTCTCGCCTGGTATCAGCAGAAGCCCGGACAGGCCCCGAGG |
| | | CTGCTGATCTACGGCGCTAGCAGAAGGGCTACCGGAATCCCAGACCGGTTC |
| | | TCCGGCTCCGGTTCCGGGACCGATTTCACCCTTACTATCTCGCGCCTGGAA |
| | | CCTGAGGACTCCGCCGTCTACTACTGCCAGCAGTACCACTCATCCCCGTCG |
| | | TGGACGTTCGGACAGGGCACCAAGCTGGAGATTAAGACCACTACCCCAGCA |
| | | CCGAGGCCACCCACCCCGGCTCCTACCATCGCCTCCCAGCCTCTGTCCCTG |
| | | CGTCCGGAGGCATGTAGACCCGCAGCTGGTGGGGCCGTGCATACCCGGGGT |
| | | CTTGACTTCGCCTGCGATATCTACATTTGGGCCCCTCTGGCTGGTACTTGC |
| | | GGGGTCCTGCTGCTTTCACTCGTGATCACTCTTTACTGTAAGCGCGGTCGG |
| | | AAGAAGCTGCTGTACATCTTTAAGCAACCCTTCATGAGGCCTGTGCAGACT |
| | | ACTCAAGAGGAGGACGGCTGTTCATGCCGGTTCCCAGAGGAGGAGGAAGGC |
| | | GGCTGCGAACTGCGCGTGAAATTCAGCCGCAGCGCAGATGCTCCAGCCTAC |
| | | AAGCAGGGGCAGAACCAGCTCTACAACGAACTCAATCTTGGTCGGAGAGAG |
| | | GAGTACGACGTGCTGGACAAGCGGAGAGGACGGGACCCAGAAATGGGCGGG |
| | | AAGCCGCGCAGAAAGAATCCCCAAGAGGGCCTGTACAACGAGCTCCAAAAG |
| | | GATAAGATGGCAGAAGCCTATAGCGAGATTGGTATGAAAGGGGAACGCAGA |
| | | AGAGGCAAAGGCCACGACGGACTGTACCAGGGACTCAGCACCGCCACCAAG |
| | | GACACCTATGACGCTCTTCACATGCAGGCCCTGCCGCCTCGG |

139105

| | | |
|---|---|---|
| 139105- aa | 8550 | MALPVTALLLPLALLLHAARPQVQLVESGGGLVQPGRSLRLSCAASGFTFD |
| Full CAR | | DYAMHWVRQAPGKGLEWVSGISWNSGSIGYADSVKGRFTISRDNAKNSLYL |
| | | QMNSLRAEDTALYYCSVHSFLAYWGQGTLVTVSSASGGGGSGGRASGGGGS |
| | | DIVMTQTPLSLPVTPGEPASISCRSSQSLLHSNGYNYLDWYLQKPGQSPQL |
| | | LIYLGSNRASGVPDRFSGSGSGTDFTLKISRVEAEDVGVYYCMQALQTPYT |
| | | FGQGTKVEIKTTTPAPRPPTPAPTIASQPLSLRPEACRPAAGGAVHTRGLD |
| | | FACDIYIWAPLAGTCGVLLLSLVITLYCKRGRKKLLYIFKQPFMRPVQTTQ |
| | | EEDGCSCRFPEEEEGGCELRVKFSRSADAPAYKQGQNQLYNELNLGRREEY |
| | | DVLDKRRGRDPEMGGKPRRKNPQEGLYNELQKDKMAEAYSEIGMKGERRRG |
| | | KGHDGLYQGLSTATKDTYDALHMQALPPR |
| 139105- nt | 8565 | ATGGCCCTCCCTGTCACCGCCCTGCTGCTTCCGCTGGCTCTTCTGCTCCAC |
| Full CAR | | GCCGCTCGGCCCCAAGTGCAACTCGTCGAATCCGGTGGAGGTCTGGTCCAA |
| | | CCTGGTAGAAGCCTGAGACTGTCGTGTGCGGCCAGCGGATTCACCTTTGAT |
| | | GACTATGCTATGCACTGGGTGCGGCAGGCCCCAGGAAAGGGCCTGGAATGG |
| | | GTGTCGGGAATTAGCTGGAACTCCGGGTCCATTGGCTACGCCGACTCCGTG |
| | | AAGGGCCGCTTCACCATCTCCCGCGACAACGCAAAGAACTCCCTGTACTTG |
| | | CAAATGAACTCGCTCAGGGCTGAGGATACCGCGCTGTACTACTGCTCCGTG |
| | | CATTCCTTCCTGGCCTACTGGGGACAGGGAACTCTGGTCACCGTGTCGAGC |
| | | GCCTCCGGCGGCGGGGGCTCGGGTGGACGGGCCTCGGGCGGAGGGGGGTCC |
| | | GACATCGTGATGACCCAGACCCCGCTGAGCTTGCCCGTGACTCCCGGAGAG |
| | | CCTGCATCCATCTCCTGCCGGTCATCCCAGTCCCTTCTCCACTCCAACGGA |
| | | TACAACTACCTCGACTGGTACCTCCAGAAGCCGGGACAGAGCCCTCAGCTT |
| | | CTGATCTACCTGGGGTCAAATAGAGCCTCAGGAGTGCCGGATCGGTTCAGC |
| | | GGATCTGGTTCGGGAACTGATTTCACTCTGAAGATTTCCCGCGTGGAAGCC |
| | | GAGGACGTGGGCGTCTACTACTGTATGCAGGCGCTGCAGACCCCCTATACC |
| | | TTCGGCCAAGGGACGAAAGTGGAGATCAAGACCACTACCCCAGCACCGAGG |
| | | CCACCCACCCCGGCTCCTACCATCGCCTCCCAGCCTCTGTCCCTGCGTCCG |
| | | GAGGCATGTAGACCCGCAGCTGGTGGGGCCGTGCATACCCGGGGTCTTGAC |
| | | TTCGCCTGCGATATCTACATTTGGGCCCCTCTGGCTGGTACTTGCGGGGTC |
| | | CTGCTGCTTTCACTCGTGATCACTCTTTACTGTAAGCGCGGTCGGAAGAAG |
| | | CTGCTGTACATCTTTAAGCAACCCTTCATGAGGCCTGTGCAGACTACTCAA |
| | | GAGGAGGACGGCTGTTCATGCCGGTTCCCAGAGGAGGAGGAAGGCGGCTGC |
| | | GAACTGCGCGTGAAATTCAGCCGCAGCGCAGATGCTCCAGCCTACAAGCAG |
| | | GGGCAGAACCAGCTCTACAACGAACTCAATCTTGGTCGGAGAGAGGAGTAC |
| | | GACGTGCTGGACAAGCGGAGAGGACGGGACCCAGAAATGGGCGGGAAGCCG |
| | | CGCAGAAAGAATCCCCAAGAGGGCCTGTACAACGAGCTCCAAAAGGATAAG |
| | | ATGGCAGAAGCCTATAGCGAGATTGGTATGAAAGGGGAACGCAGAAGAGGC |
| | | AAAGGCCACGACGGACTGTACCAGGGACTCAGCACCGCCACCAAGGACACC |
| | | TATGACGCTCTTCACATGCAGGCCCTGCCGCCTCGG |

139111

| | | |
|---|---|---|
| 139111- aa | 8551 | MALPVTALLLPLALLLHAARPEVQLLESGGGLVQPGGSLRLSCAVSGFALS |
| Full CAR | | NHGMSWVRRAPGKGLEWVSGIVYSGSTYYAASVKGRFTISRDNSRNTLYLQ |
| | | MNSLRPEDTAIYYCSAHGGESDVWGQGTTVTVSSASGGGGSGGRASGGGGS |
| | | DIVMTQTPLSLSVTPGQPASISCKSSQSLLRNDGKTPLYWYLQKAGQPPQL |
| | | LIYEVSNRFSGVPDRFSGSGSGTDFTLKISRVEAEDVGAYYCMQNIQFPSF |
| | | GGGTKLEIKTTTPAPRPPTPAPTIASQPLSLRPEACRPAAGGAVHTRGLDF |
| | | ACDIYIWAPLAGTCGVLLLSLVITLYCKRGRKKLLYIFKQPFMRPVQTTQE |
| | | EDGCSCRFPEEEEGGCELRVKFSRSADAPAYKQGQNQLYNELNLGRREEYD |
| | | VLDKRRGRDPEMGGKPRRKNPQEGLYNELQKDKMAEAYSEIGMKGERRRGK |
| | | GHDGLYQGLSTATKDTYDALHMQALPPR |
| 139111- nt | 8566 | ATGGCCCTCCCTGTCACCGCCCTGCTGCTTCCGCTGGCTCTTCTGCTCCAC |
| Full CAR | | GCCGCTCGGCCCGAAGTGCAATTGTTGGAATCTGGAGGAGGACTTGTGCAG |
| | | CCTGGAGGATCACTGAGACTTTCGTGTGCGGTGTCAGGCTTCGCCCTGAGC |
| | | AACCACGGCATGAGCTGGGTGCGGAGAGCCCCGGGGAAGGGTCTGGAATGG |
| | | GTGTCCGGGATCGTCTACTCCGGTTCAACTTACTACGCCGCAAGCGTGAAG |
| | | GGTCGCTTCACCATTTCCCGCGATAACTCCCGGAACACCCTGTACCTCCAA |
| | | ATGAACTCCCTGCGGCCCGAGGACACCGCCATCTACTACTGTTCCGCGCAT |
| | | GGAGGAGAGTCCGATGTCTGGGGACAGGGCACTACCGTGACCGTGTCGAGC |
| | | GCCTCGGGGGGAGGAGGCTCCGGCGGTCGCGCCTCCGGGGGGGGTGGCAGC |
| | | GACATTGTGATGACGCAGACTCCACTCTCGCTGTCCGTGACCCCGGGACAG |
| | | CCCGCGTCCATCTCGTGCAAGAGCTCCCAGAGCCTGCTGAGGAACGACGGA |
| | | AAGACTCCTCTGTATTGGTACCTCCAGAAGGCTGGACAGCCCCCGCAACTG |
| | | CTCATCTACGAAGTGTCAAATCGCTTCTCCGGGGTGCCGGATCGGTTTTCC |
| | | GGCTCGGGATCGGGCACCGACTTCACCCTGAAAATCTCCAGGGTCGAGGCC |
| | | GAGGACGTGGGAGCCTACTACTGCATGCAAAACATCCAGTTCCCTTCCTTC |
| | | GGCGGCGGCACAAAGCTGGAGATTAAGACCACTACCCCAGCACCGAGGCCA |
| | | CCCACCCCGGCTCCTACCATCGCCTCCCAGCCTCTGTCCCTGCGTCCGGAG |
| | | GCATGTAGACCCGCAGCTGGTGGGGCCGTGCATACCCGGGGTCTTGACTTC |
| | | GCCTGCGATATCTACATTTGGGCCCCTCTGGCTGGTACTTGCGGGGTCCTG |
| | | CTGCTTTCACTCGTGATCACTCTTTACTGTAAGCGCGGTCGGAAGAAGCTG |
| | | CTGTACATCTTTAAGCAACCCTTCATGAGGCCTGTGCAGACTACTCAAGAG |
| | | GAGGACGGCTGTTCATGCCGGTTCCCAGAGGAGGAGGAAGGCGGCTGCGAA |
| | | CTGCGCGTGAAATTCAGCCGCAGCGCAGATGCTCCAGCCTACAAGCAGGGG |
| | | CAGAACCAGCTCTACAACGAACTCAATCTTGGTCGGAGAGAGGAGTACGAC |
| | | GTGCTGGACAAGCGGAGAGGACGGGACCCAGAAATGGGCGGGAAGCCGCGC |
| | | AGAAAGAATCCCCAAGAGGGCCTGTACAACGAGCTCCAAAAGGATAAGATG |
| | | GCAGAAGCCTATAGCGAGATTGGTATGAAAGGGGAACGCAGAAGAGGCAAA |
| | | GGCCACGACGGACTGTACCAGGGACTCAGCACCGCCACCAAGGACACCTAT |
| | | GACGCTCTTCACATGCAGGCCCTGCCGCCTCGG |

139100

| | | |
|---|---|---|
| 139100- aa | 8552 | MALPVTALLLPLALLLHAARPQVQLVQSGAEVRKTGASVKVSCKASGYIFD |
| Full CAR | | NFGINWVRQAPGQGLEWMGWINPKNNNTNYAQKFQGRVTITADESTNTAYM |
| | | EVSSLRSEDTAVYYCARGPYYYQSYMDVWGQGTMVTVSSASGGGGSGGRAS |
| | | GGGGSDIVMTQTPLSLPVTPGEPASISCRSSQSLLHSNGYNYLNWYLQKPG |
| | | QSPQLLIYLGSKRASGVPDRFSGSGSGTDFTLHITRVGAEDVGVYYCMQAL |
| | | QTPYTFGQGTKLEIKTTTPAPRPPTPAPTIASQPLSLRPEACRPAAGGAVH |
| | | TRGLDFACDIYIWAPLAGTCGVLLLSLVITLYCKRGRKKLLYIFKQPFMRP |
| | | VQTTQEEDGCSCRFPEEEEGGCELRVKFSRSADAPAYKQGQNQLYNELNLG |
| | | RREEYDVLDKRRGRDPEMGGKPRRKNPQEGLYNELQKDKMAEAYSEIGMKG |
| | | ERRRGKGHDGLYQGLSTATKDTYDALHMQALPPR |
| 139100- nt | 8567 | ATGGCCCTCCCTGTCACCGCCCTGCTGCTTCCGCTGGCTCTTCTGCTCCAC |
| Full CAR | | GCCGCTCGGCCCCAAGTCCAACTCGTCCAGTCCGGCGCAGAAGTCAGAAAA |
| | | ACCGGTGCTAGCGTGAAAGTGTCCTGCAAGGCCTCCGGCTACATTTTCGAT |
| | | AACTTCGGAATCAACTGGGTCAGACAGGCCCCGGGCCAGGGGCTGGAATGG |
| | | ATGGGATGGATCAACCCCAAGAACAACAACACCAACTACGCACAGAAGTTC |
| | | CAGGGCCGCGTGACTATCACCGCCGATGAATCGACCAATACCGCCTACATG |
| | | GAGGTGTCCTCCCTGCGGTCGGAGGACACTGCCGTGTATTACTGCGCGAGG |
| | | GGCCCATACTACTACCAAAGCTACATGGACGTCTGGGGACAGGGAACCATG |
| | | GTGACCGTGTCATCCGCCTCCGGTGGTGGAGGCTCCGGGGGGCGGGCTTCA |
| | | GGAGGCGGAGGAAGCGATATTGTGATGACCCAGACTCCGCTTAGCCTGCCC |
| | | GTGACTCCTGGAGAACCGGCCTCCATTTCCTGCCGGTCCTCGCAATCACTC |
| | | CTGCATTCCAACGGTTACAACTACCTGAATTGGTACCTCCAGAAGCCTGGC |
| | | CAGTCGCCCCAGTTGCTGATCTATCTGGGCTCGAAGCGCGCCTCCGGGGTG |
| | | CCTGACCGGTTTAGCGGATCTGGGAGCGGCACGGACTTCACTCTCCACATC |
| | | ACCCGCGTGGGAGCGGAGGACGTGGGAGTGTACTACTGTATGCAGGCGCTG |
| | | CAGACTCCGTACACATTCGGACAGGGCACCAAGCTGGAGATCAAGACCACT |
| | | ACCCCAGCACCGAGGCCACCCACCCCGGCTCCTACCATCGCCTCCCAGCCT |
| | | CTGTCCCTGCGTCCGGAGGCATGTAGACCCGCAGCTGGTGGGGCCGTGCAT |
| | | ACCCGGGGTCTTGACTTCGCCTGCGATATCTACATTTGGGCCCCTCTGGCT |
| | | GGTACTTGCGGGGTCCTGCTGCTTTCACTCGTGATCACTCTTTACTGTAAG |
| | | CGCGGTCGGAAGAAGCTGCTGTACATCTTTAAGCAACCCTTCATGAGGCCT |
| | | GTGCAGACTACTCAAGAGGAGGACGGCTGTTCATGCCGGTTCCCAGAGGAG |
| | | GAGGAAGGCGGCTGCGAACTGCGCGTGAAATTCAGCCGCAGCGCAGATGCT |
| | | CCAGCCTACAAGCAGGGGCAGAACCAGCTCTACAACGAACTCAATCTTGGT |
| | | CGGAGAGAGGAGTACGACGTGCTGGACAAGCGGAGAGGACGGGACCCAGAA |
| | | ATGGGCGGGAAGCCGCGCAGAAAGAATCCCCAAGAGGGCCTGTACAACGAG |
| | | CTCCAAAAGGATAAGATGGCAGAAGCCTATAGCGAGATTGGTATGAAAGGG |
| | | GAACGCAGAAGAGGCAAAGGCCACGACGGACTGTACCAGGGACTCAGCACC |
| | | GCCACCAAGGACACCTATGACGCTCTTCACATGCAGGCCCTGCCGCCTCGG |

139101

| | | |
|---|---|---|
| 139101- aa | 8553 | MALPVTALLLPLALLLHAARPQVQLQESGGGLVQPGGSLRLSCAASGFTFS |
| Full CAR | | SDAMTWVRQAPGKGLEWVSVISGSGGTTYYADSVKGRFTISRDNSKNTLYL |
| | | QMNSLRAEDTAVYYCAKLDSSGYYYARGPRYWGQGTLVTVSSASGGGGSGG |
| | | RASGGGGSDIQLTQSPSSLSASVGDRVTITCRASQSISSYLNWYQQKPGKA |
| | | PKLLIYGASTLASGVPARFSGSGSGTHFTLTINSLQSEDSATYYCQQSYKR |
| | | ASFGQGTKVEIKTTTPAPRPPTPAPTIASQPLSLRPEACRPAAGGAVHTRG |
| | | LDFACDIYIWAPLAGTCGVLLLSLVITLYCKRGRKKLLYIFKQPFMRPVQT |
| | | TQEEDGCSCRFPEEEEGGCELRVKFSRSADAPAYKQGQNQLYNELNLGRRE |
| | | EYDVLDKRRGRDPEMGGKPRRKNPQEGLYNELQKDKMAEAYSEIGMKGERR |
| | | RGKGHDGLYQGLSTATKDTYDALHMQALPPR |
| 139101- nt | 8568 | ATGGCCCTCCCTGTCACCGCCCTGCTGCTTCCGCTGGCTCTTCTGCTCCAC |
| Full CAR | | GCCGCTCGGCCCCAAGTGCAACTTCAAGAATCAGGCGGAGGACTCGTGCAG |
| | | CCCGGAGGATCATTGCGGCTCTCGTGCGCCGCCTCGGGCTTCACCTTCTCG |
| | | AGCGACGCCATGACCTGGGTCCGCCAGGCCCCGGGGAAGGGGCTGGAATGG |
| | | GTGTCTGTGATTTCCGGCTCCGGGGGAACTACGTACTACGCCGATTCCGTG |
| | | AAAGGTCGCTTCACTATCTCCCGGGACAACAGCAAGAACACCCTTTATCTG |
| | | CAAATGAATTCCCTCCGCGCCGAGGACACCGCCGTGTACTACTGCGCCAAG |
| | | CTGGACTCCTCGGGCTACTACTATGCCCGGGGTCCGAGATACTGGGGACAG |
| | | GGAACCCTCGTGACCGTGTCCTCCGCGTCCGGCGGAGGAGGGTCGGGAGGG |
| | | CGGGCCTCCGGCGGCGGCGGTTCGGACATCCAGCTGACCCAGTCCCCATCC |
| | | TCACTGAGCGCAAGCGTGGGCGACAGAGTCACCATTACATGCAGGGCGTCC |
| | | CAGAGCATCAGCTCCTACCTGAACTGGTACCAACAGAAGCCTGGAAAGGCT |
| | | CCTAAGCTGTTGATCTACGGGGCTTCGACCCTGGCATCCGGGGTGCCCGCG |
| | | AGGTTTAGCGGAAGCGGTAGCGGCACTCACTTCACTCTGACCATTAACAGC |
| | | CTCCAGTCCGAGGATTCAGCCACTTACTACTGTCAGCAGTCCTACAAGCGG |
| | | GCCAGCTTCGGACAGGGCACTAAGGTCGAGATCAAGACCACTACCCCAGCA |
| | | CCGAGGCCACCCACCCCGGCTCCTACCATCGCCTCCCAGCCTCTGTCCCTG |
| | | CGTCCGGAGGCATGTAGACCCGCAGCTGGTGGGGCCGTGCATACCCGGGGT |
| | | CTTGACTTCGCCTGCGATATCTACATTTGGGCCCCTCTGGCTGGTACTTGC |
| | | GGGGTCCTGCTGCTTTCACTCGTGATCACTCTTTACTGTAAGCGCGGTCGG |
| | | AAGAAGCTGCTGTACATCTTTAAGCAACCCTTCATGAGGCCTGTGCAGACT |
| | | ACTCAAGAGGAGGACGGCTGTTCATGCCGGTTCCCAGAGGAGGAGGAAGGC |
| | | GGCTGCGAACTGCGCGTGAAATTCAGCCGCAGCGCAGATGCTCCAGCCTAC |
| | | AAGCAGGGGCAGAACCAGCTCTACAACGAACTCAATCTTGGTCGGAGAGAG |
| | | GAGTACGACGTGCTGGACAAGCGGAGAGGACGGGACCCAGAAATGGGCGGG |
| | | AAGCCGCGCAGAAAGAATCCCCAAGAGGGCCTGTACAACGAGCTCCAAAAG |
| | | GATAAGATGGCAGAAGCCTATAGCGAGATTGGTATGAAAGGGGAACGCAGA |
| | | AGAGGCAAAGGCCACGACGGACTGTACCAGGGACTCAGCACCGCCACCAAG |
| | | GACACCTATGACGCTCTTCACATGCAGGCCCTGCCGCCTCGG |

139102

| | | |
|---|---|---|
| 139102- aa | 8554 | MALPVTALLLPLALLLHAARPQVQLVQSGAEVKKPGASVKVSCKASGYTFS |
| Full CAR | | NYGITWVRQAPGQGLEWMGWISAYNGNTNYAQKFQGRVTMTRNTSISTAYM |
| | | ELSSLRSEDTAVYYCARGPYYYYMDVWGKGTMVTVSSASGGGGSGGRASGG |
| | | GGSEIVMTQSPLSLPVTPGEPASISCRSSQSLLYSNGYNYVDWYLQKPGQS |
| | | PQLLIYLGSNRASGVPDRFSGSGSGTDFKLQISRVEAEDVGIYYCMQGRQF |
| | | PYSFGQGTKVEIKTTTPAPRPPTPAPTIASQPLSLRPEACRPAAGGAVHTR |
| | | GLDFACDIYIWAPLAGTCGVLLLSLVITLYCKRGRKKLLYIFKQPFMRPVQ |
| | | TTQEEDGCSCRFPEEEEGGCELRVKFSRSADAPAYKQGQNQLYNELNLGRR |
| | | EEYDVLDKRRGRDPEMGGKPRRKNPQEGLYNELQKDKMAEAYSEIGMKGER |
| | | RRGKGHDGLYQGLSTATKDTYDALHMQALPPR |
| 139102- nt | 8569 | ATGGCCCTCCCTGTCACCGCCCTGCTGCTTCCGCTGGCTCTTCTGCTCCAC |
| Full CAR | | GCCGCTCGGCCCCAAGTCCAACTGGTCCAGAGCGGTGCAGAAGTGAAGAAG |
| | | CCCGGAGCGAGCGTGAAAGTGTCCTGCAAGGCTTCCGGGTACACCTTCTCC |
| | | AACTACGGCATCACTTGGGTGCGCCAGGCCCCGGGACAGGGCCTGGAATGG |
| | | ATGGGGTGGATTTCCGCGTACAACGGCAATACGAACTACGCTCAGAAGTTC |
| | | CAGGGTAGAGTGACCATGACTAGGAACACCTCCATTTCCACCGCCTACATG |
| | | GAACTGTCCTCCCTGCGGAGCGAGGACACCGCCGTGTACTATTGCGCCCGG |
| | | GGACCATACTACTACTACATGGATGTCTGGGGGAAGGGGACTATGGTCACC |
| | | GTGTCATCCGCCTCGGGAGGCGGCGGATCAGGAGGACGCGCCTCTGGTGGT |
| | | GGAGGATCGGAGATCGTGATGACCCAGAGCCCTCTCTCCTTGCCCGTGACT |
| | | CCTGGGGAGCCCGCATCCATTTCATGCCGGAGCTCCCAGTCACTTCTCTAC |
| | | TCCAACGGCTATAACTACGTGGATTGGTACCTCCAAAAGCCGGGCCAGAGC |
| | | CCGCAGCTGCTGATCTACCTGGGCTCGAACAGGGCCAGCGGAGTGCCTGAC |
| | | CGGTTCTCCGGGTCGGGAAGCGGGACCGACTTCAAGCTGCAAATCTCGAGA |
| | | GTGGAGGCCGAGGACGTGGGAATCTACTACTGTATGCAGGGCCGCCAGTTT |
| | | CCGTACTCGTTCGGACAGGGCACCAAAGTGGAAATCAAGACCACTACCCCA |
| | | GCACCGAGGCCACCCACCCCGGCTCCTACCATCGCCTCCCAGCCTCTGTCC |
| | | CTGCGTCCGGAGGCATGTAGACCCGCAGCTGGTGGGGCCGTGCATACCCGG |
| | | GGTCTTGACTTCGCCTGCGATATCTACATTTGGGCCCCTCTGGCTGGTACT |
| | | TGCGGGGTCCTGCTGCTTTCACTCGTGATCACTCTTTACTGTAAGCGCGGT |
| | | CGGAAGAAGCTGCTGTACATCTTTAAGCAACCCTTCATGAGGCCTGTGCAG |
| | | ACTACTCAAGAGGAGGACGGCTGTTCATGCCGGTTCCCAGAGGAGGAGGAA |
| | | GGCGGCTGCGAACTGCGCGTGAAATTCAGCCGCAGCGCAGATGCTCCAGCC |
| | | TACAAGCAGGGGCAGAACCAGCTCTACAACGAACTCAATCTTGGTCGGAGA |
| | | GAGGAGTACGACGTGCTGGACAAGCGGAGAGGACGGGACCCAGAAATGGGC |
| | | GGGAAGCCGCGCAGAAAGAATCCCCAAGAGGGCCTGTACAACGAGCTCCAA |
| | | AAGGATAAGATGGCAGAAGCCTATAGCGAGATTGGTATGAAAGGGGAACGC |
| | | AGAAGAGGCAAAGGCCACGACGGACTGTACCAGGGACTCAGCACCGCCACC |
| | | AAGGACACCTATGACGCTCTTCACATGCAGGCCCTGCCGCCTCGG |

139104

| | | |
|---|---|---|
| 139104- aa | 8555 | MALPVTALLLPLALLLHAARPEVQLLETGGGLVQPGGSLRLSCAVSGFALS |
| Full CAR | | NHGMSWVRRAPGKGLEWVSGIVYSGSTYYAASVKGRFTISRDNSRNTLYLQ |
| | | MNSLRPEDTAIYYCSAHGGESDVWGQGTTVTVSSASGGGGSGGRASGGGGS |
| | | EIVLTQSPATLSVSPGESATLSCRASQSVSSNLAWYQQKPGQAPRLLIYGA |
| | | STRASGIPDRFSGSGSGTDFTLTISSLQAEDVAVYYCQQYGSSLTFGGGTK |
| | | VEIKTTTPAPRPPTPAPTIASQPLSLRPEACRPAAGGAVHTRGLDFACDIY |
| | | IWAPLAGTCGVLLLSLVITLYCKRGRKKLLYIFKQPFMRPVQTTQEEDGCS |
| | | CRFPEEEEGGCELRVKFSRSADAPAYKQGQNQLYNELNLGRREEYDVLDKR |
| | | RGRDPEMGGKPRRKNPQEGLYNELQKDKMAEAYSEIGMKGERRRGKGHDGL |
| | | YQGLSTATKDTYDALHMQALPPR |
| 139104- nt | 8570 | ATGGCCCTCCCTGTCACCGCCCTGCTGCTTCCGCTGGCTCTTCTGCTCCAC |
| Full CAR | | GCCGCTCGGCCCGAAGTGCAATTGCTCGAAACTGGAGGAGGTCTGGTGCAA |
| | | CCTGGAGGATCACTTCGCCTGTCCTGCGCCGTGTCGGGCTTTGCCCTGTCC |
| | | AACCATGGAATGAGCTGGGTCCGCCGCGCGCCGGGGAAGGGCCTCGAATGG |
| | | GTGTCCGGCATCGTCTACTCCGGCTCCACCTACTACGCCGCGTCCGTGAAG |
| | | GGCCGGTTCACGATTTCACGGGACAACTCGCGGAACACCCTGTACCTCCAA |
| | | ATGAATTCCCTTCGGCCGGAGGATACTGCCATCTACTACTGCTCCGCCCAC |
| | | GGTGGCGAATCCGACGTCTGGGGCCAGGGAACCACCGTGACCGTGTCCAGC |
| | | GCGTCCGGGGGAGGAGGAAGCGGGGGTAGAGCATCGGGTGGAGGCGGATCA |
| | | GAGATCGTGCTGACCCAGTCCCCCGCCACCTTGAGCGTGTCACCAGGAGAG |
| | | TCCGCCACCCTGTCATGCCGCGCCAGCCAGTCCGTGTCCTCCAACCTGGCT |
| | | TGGTACCAGCAGAAGCCGGGGCAGGCCCCTAGACTCCTGATCTATGGGGCG |
| | | TCGACCCGGGCATCTGGAATTCCCGATAGGTTCAGCGGATCGGGCTCGGGC |
| | | ACTGACTTCACTCTGACCATCTCCTCGCTGCAAGCCGAGGACGTGGCTGTG |
| | | TACTACTGTCAGCAGTACGGAAGCTCCCTGACTTTCGGTGGCGGGACCAAA |
| | | GTCGAGATTAAGACCACTACCCCAGCACCGAGGCCACCCACCCCGGCTCCT |
| | | ACCATCGCCTCCCAGCCTCTGTCCCTGCGTCCGGAGGCATGTAGACCCGCA |
| | | GCTGGTGGGGCCGTGCATACCCGGGGTCTTGACTTCGCCTGCGATATCTAC |
| | | ATTTGGGCCCCTCTGGCTGGTACTTGCGGGGTCCTGCTGCTTTCACTCGTG |
| | | ATCACTCTTTACTGTAAGCGCGGTCGGAAGAAGCTGCTGTACATCTTTAAG |
| | | CAACCCTTCATGAGGCCTGTGCAGACTACTCAAGAGGAGGACGGCTGTTCA |
| | | TGCCGGTTCCCAGAGGAGGAGGAAGGCGGCTGCGAACTGCGCGTGAAATTC |
| | | AGCCGCAGCGCAGATGCTCCAGCCTACAAGCAGGGGCAGAACCAGCTCTAC |
| | | AACGAACTCAATCTTGGTCGGAGAGAGGAGTACGACGTGCTGGACAAGCGG |
| | | AGAGGACGGGACCCAGAAATGGGCGGGAAGCCGCGCAGAAAGAATCCCCAA |
| | | GAGGGCCTGTACAACGAGCTCCAAAAGGATAAGATGGCAGAAGCCTATAGC |
| | | GAGATTGGTATGAAAGGGGAACGCAGAAGAGGCAAAGGCCACGACGGACTG |
| | | TACCAGGGACTCAGCACCGCCACCAAGGACACCTATGACGCTCTTCACATG |
| | | CAGGCCCTGCCGCCTCGG |

139106

| | | |
|---|---|---|
| 139106- aa | 8556 | MALPVTALLLPLALLLHAARPEVQLVETGGGLVQPGGSLRLSCAVSGFALS |
| Full CAR | | NHGMSWVRRAPGKGLEWVSGIVYSGSTYYAASVKGRFTISRDNSRNTLYLQ |
| | | MNSLRPEDTAIYYCSAHGGESDVWGQGTTVTVSSASGGGGSGGRASGGGGS |
| | | EIVMTQSPATLSVSPGERATLSCRASQSVSSKLAWYQQKPGQAPRLLMYGA |
| | | SIRATGIPDRFSGSGSGTEFTLTISSLEPEDFAVYYCQQYGSSSWTFGQGT |
| | | KVEIKTTTPAPRPPTPAPTIASQPLSLRPEACRPAAGGAVHTRGLDFACDI |
| | | YIWAPLAGTCGVLLLSLVITLYCKRGRKKLLYIFKQPFMRPVQTTQEEDGC |
| | | SCRFPEEEEGGCELRVKESRSADAPAYKQGQNQLYNELNLGRREEYDVLDK |
| | | RRGRDPEMGGKPRRKNPQEGLYNELQKDKMAEAYSEIGMKGERRRGKGHDG |
| | | LYQGLSTATKDTYDALHMQALPPR |
| 139106- nt | 8571 | ATGGCCCTCCCTGTCACCGCCCTGCTGCTTCCGCTGGCTCTTCTGCTCCAC |
| Full CAR | | GCCGCTCGGCCCGAAGTGCAATTGGTGGAAACTGGAGGAGGACTTGTGCAA |
| | | CCTGGAGGATCATTGAGACTGAGCTGCGCAGTGTCGGGATTCGCCCTGAGC |
| | | AACCATGGAATGTCCTGGGTCAGAAGGGCCCCTGGAAAAGGCCTCGAATGG |
| | | GTGTCAGGGATCGTGTACTCCGGTTCCACTTACTACGCCGCCTCCGTGAAG |
| | | GGGCGCTTCACTATCTCACGGGATAACTCCCGCAATACCCTGTACCTCCAA |
| | | ATGAACAGCCTGCGGCCGGAGGATACCGCCATCTACTACTGTTCCGCCCAC |
| | | GGTGGAGAGTCTGACGTCTGGGGCCAGGGAACTACCGTGACCGTGTCCTCC |
| | | GCGTCCGGCGGTGGAGGGAGCGGCGGCCGCGCCAGCGGCGGCGGAGGCTCC |
| | | GAGATCGTGATGACCCAGAGCCCCGCTACTCTGTCGGTGTCGCCCGGAGAA |
| | | AGGGCGACCCTGTCCTGCCGGGCGTCGCAGTCCGTGAGCAGCAAGCTGGCT |
| | | TGGTACCAGCAGAAGCCGGGCCAGGCACCACGCCTGCTTATGTACGGTGCC |
| | | TCCATTCGGGCCACCGGAATCCCGGACCGGTTCTCGGGGTCGGGGTCCGGT |
| | | ACCGAGTTCACACTGACCATTTCCTCGCTCGAGCCCGAGGACTTTGCCGTC |
| | | TATTACTGCCAGCAGTACGGCTCCTCCTCATGGACGTTCGGCCAGGGGACC |
| | | AAGGTCGAAATCAAGACCACTACCCCAGCACCGAGGCCACCCACCCCGGCT |
| | | CCTACCATCGCCTCCCAGCCTCTGTCCCTGCGTCCGGAGGCATGTAGACCC |
| | | GCAGCTGGTGGGGCCGTGCATACCCGGGGTCTTGACTTCGCCTGCGATATC |
| | | TACATTTGGGCCCCTCTGGCTGGTACTTGCGGGGTCCTGCTGCTTTCACTC |
| | | GTGATCACTCTTTACTGTAAGCGCGGTCGGAAGAAGCTGCTGTACATCTTT |
| | | AAGCAACCCTTCATGAGGCCTGTGCAGACTACTCAAGAGGAGGACGGCTGT |
| | | TCATGCCGGTTCCCAGAGGAGGAGGAAGGCGGCTGCGAACTGCGCGTGAAA |
| | | TTCAGCCGCAGCGCAGATGCTCCAGCCTACAAGCAGGGGCAGAACCAGCTC |
| | | TACAACGAACTCAATCTTGGTCGGAGAGAGGAGTACGACGTGCTGGACAAG |
| | | CGGAGAGGACGGGACCCAGAAATGGGCGGGAAGCCGCGCAGAAAGAATCCC |
| | | CAAGAGGGCCTGTACAACGAGCTCCAAAAGGATAAGATGGCAGAAGCCTAT |
| | | AGCGAGATTGGTATGAAAGGGGAACGCAGAAGAGGCAAAGGCCACGACGGA |
| | | CTGTACCAGGGACTCAGCACCGCCACCAAGGACACCTATGACGCTCTTCAC |
| | | ATGCAGGCCCTGCCGCCTCGG |

139107

| | | |
|---|---|---|
| 139107- aa | 8557 | MALPVTALLLPLALLLHAARPEVQLVETGGGVVQPGGSLRLSCAVSGFALS |
| Full CAR | | NHGMSWVRRAPGKGLEWVSGIVYSGSTYYAASVKGRFTISRDNSRNTLYLQ |
| | | MNSLRPEDTAIYYCSAHGGESDVWGQGTTVTVSSASGGGGSGGRASGGGGS |
| | | EIVLTQSPGTLSLSPGERATLSCRASQSVGSTNLAWYQQKPGQAPRLLIYD |
| | | ASNRATGIPDRFSGGGSGTDFTLTISRLEPEDFAVYYCQQYGSSPPWTFGQ |
| | | GTKVEIKTTTPAPRPPTPAPTIASQPLSLRPEACRPAAGGAVHTRGLDFAC |
| | | DIYIWAPLAGTCGVLLLSLVITLYCKRGRKKLLYIFKQPFMRPVQTTQEED |
| | | GCSCRFPEEEEGGCELRVKFSRSADAPAYKQGQNQLYNELNLGRREEYDVL |
| | | DKRRGRDPEMGGKPRRKNPQEGLYNELQKDKMAEAYSEIGMKGERRRGKGH |
| | | DGLYQGLSTATKDTYDALHMQALPPR |
| 139107- nt | 8572 | ATGGCCCTCCCTGTCACCGCCCTGCTGCTTCCGCTGGCTCTTCTGCTCCAC |
| Full CAR | | GCCGCTCGGCCCGAAGTGCAATTGGTGGAGACTGGAGGAGGAGTGGTGCAA |
| | | CCTGGAGGAAGCCTGAGACTGTCATGCGCGGTGTCGGGCTTCGCCCTCTCC |
| | | AACCACGGAATGTCCTGGGTCCGCCGGGCCCCTGGGAAAGGACTTGAATGG |
| | | GTGTCCGGCATCGTGTACTCGGGTTCCACCTACTACGCGGCCTCAGTGAAG |
| | | GGCCGGTTTACTATTAGCCGCGACAACTCCAGAAACACACTGTACCTCCAA |
| | | ATGAACTCGCTGCGGCCGGAAGATACCGCTATCTACTACTGCTCCGCCCAT |
| | | GGGGGAGAGTCGGACGTCTGGGGACAGGGCACCACTGTCACTGTGTCCAGC |
| | | GCTTCCGGCGGTGGTGGAAGCGGGGGACGGGCCTCAGGAGGCGGTGGCAGC |
| | | GAGATTGTGCTGACCCAGTCCCCCGGGACCCTGAGCCTGTCCCCGGGAGAA |
| | | AGGGCCACCCTCTCCTGTCGGGCATCCCAGTCCGTGGGGTCTACTAACCTT |
| | | GCATGGTACCAGCAGAAGCCCGGCCAGGCCCCTCGCCTGCTGATCTACGAC |
| | | GCGTCCAATAGAGCCACCGGCATCCCGGATCGCTTCAGCGGAGGCGGATCG |
| | | GGCACCGACTTCACCCTCACCATTTCAAGGCTGGAACCGGAGGACTTCGCC |
| | | GTGTACTACTGCCAGCAGTATGGTTCGTCCCCACCCTGGACGTTCGGCCAG |
| | | GGGACTAAGGTCGAGATCAAGACCACTACCCCAGCACCGAGGCCACCCACC |
| | | CCGGCTCCTACCATCGCCTCCCAGCCTCTGTCCCTGCGTCCGGAGGCATGT |
| | | AGACCCGCAGCTGGTGGGGCCGTGCATACCCGGGGTCTTGACTTCGCCTGC |
| | | GATATCTACATTTGGGCCCCTCTGGCTGGTACTTGCGGGGTCCTGCTGCTT |
| | | TCACTCGTGATCACTCTTTACTGTAAGCGCGGTCGGAAGAAGCTGCTGTAC |
| | | ATCTTTAAGCAACCCTTCATGAGGCCTGTGCAGACTACTCAAGAGGAGGAC |
| | | GGCTGTTCATGCCGGTTCCCAGAGGAGGAGGAAGGCGGCTGCGAACTGCGC |
| | | GTGAAATTCAGCCGCAGCGCAGATGCTCCAGCCTACAAGCAGGGGCAGAAC |
| | | CAGCTCTACAACGAACTCAATCTTGGTCGGAGAGAGGAGTACGACGTGCTG |
| | | GACAAGCGGAGAGGACGGGACCCAGAAATGGGCGGGAAGCCGCGCAGAAAG |
| | | AATCCCCAAGAGGGCCTGTACAACGAGCTCCAAAAGGATAAGATGGCAGAA |
| | | GCCTATAGCGAGATTGGTATGAAAGGGGAACGCAGAAGAGGCAAAGGCCAC |
| | | GACGGACTGTACCAGGGACTCAGCACCGCCACCAAGGACACCTATGACGCT |
| | | CTTCACATGCAGGCCCTGCCGCCTCGG |

139108

| | | |
|---|---|---|
| 139108- aa | 8558 | MALPVTALLLPLALLLHAARPQVQLVESGGGLVKPGGSLRLSCAASGFTFS |
| Full CAR | | DYYMSWIRQAPGKGLEWVSYISSSGSTIYYADSVKGRFTISRDNAKNSLYL |
| | | QMNSLRAEDTAVYYCARESGDGMDVWGQGTTVTVSSASGGGGSGGRASGGG |
| | | GSDIQMTQSPSSLSASVGDRVTITCRASQSISSYLNWYQQKPGKAPKLLIY |
| | | AASSLQSGVPSRFSGSGSGTDFTLTISSLQPEDFATYYCQQSYTLAFGQGT |
| | | KVDIKTTTPAPRPPTPAPTIASQPLSLRPEACRPAAGGAVHTRGLDFACDI |
| | | YIWAPLAGTCGVLLLSLVITLYCKRGRKKLLYIFKQPFMRPVQTTQEEDGC |
| | | SCRFPEEEEGGCELRVKFSRSADAPAYKQGQNQLYNELNLGRREEYDVLDK |
| | | RRGRDPEMGGKPRRKNPQEGLYNELQKDKMAEAYSEIGMKGERRRGKGHDG |
| | | LYQGLSTATKDTYDALHMQALPPR |
| 139108- nt | 8573 | ATGGCCCTCCCTGTCACCGCCCTGCTGCTTCCGCTGGCTCTTCTGCTCCAC |
| Full CAR | | GCCGCTCGGCCCCAAGTGCAACTCGTGGAATCTGGTGGAGGACTCGTGAAA |
| | | CCTGGAGGATCATTGAGACTGTCATGCGCGGCCTCGGGATTCACGTTCTCC |
| | | GATTACTACATGAGCTGGATTCGCCAGGCTCCGGGGAAGGGACTGGAATGG |
| | | GTGTCCTACATTTCCTCATCCGGCTCCACCATCTACTACGCGGACTCCGTG |
| | | AAGGGGAGATTCACCATTAGCCGCGATAACGCCAAGAACAGCCTGTACCTT |
| | | CAGATGAACTCCCTGCGGGCTGAAGATACTGCCGTCTACTACTGCGCAAGG |
| | | GAGAGCGGAGATGGGATGGACGTCTGGGGACAGGGTACCACTGTGACCGTG |
| | | TCGTCGGCCTCCGGCGGAGGGGGTTCGGGTGGAAGGGCCAGCGGCGGCGGA |
| | | GGCAGCGACATCCAGATGACCCAGTCCCCCTCATCGCTGTCCGCCTCCGTG |
| | | GGCGACCGCGTCACCATCACATGCCGGGCCTCACAGTCGATCTCCTCCTAC |
| | | CTCAATTGGTATCAGCAGAAGCCCGGAAAGGCCCCTAAGCTTCTGATCTAC |
| | | GCAGCGTCCTCCCTGCAATCCGGGGTCCCATCTCGGTTCTCCGGCTCGGGC |
| | | AGCGGTACCGACTTCACTCTGACCATCTCGAGCCTGCAGCCGGAGGACTTC |
| | | GCCACTTACTACTGTCAGCAAAGCTACACCCTCGCGTTTGGCCAGGGCACC |
| | | AAAGTGGACATCAAGACCACTACCCCAGCACCGAGGCCACCCACCCCGGCT |
| | | CCTACCATCGCCTCCCAGCCTCTGTCCCTGCGTCCGGAGGCATGTAGACCC |
| | | GCAGCTGGTGGGGCCGTGCATACCCGGGGTCTTGACTTCGCCTGCGATATC |
| | | TACATTTGGGCCCCTCTGGCTGGTACTTGCGGGGTCCTGCTGCTTTCACTC |
| | | GTGATCACTCTTTACTGTAAGCGCGGTCGGAAGAAGCTGCTGTACATCTTT |
| | | AAGCAACCCTTCATGAGGCCTGTGCAGACTACTCAAGAGGAGGACGGCTGT |
| | | TCATGCCGGTTCCCAGAGGAGGAGGAAGGCGGCTGCGAACTGCGCGTGAAA |
| | | TTCAGCCGCAGCGCAGATGCTCCAGCCTACAAGCAGGGGCAGAACCAGCTC |
| | | TACAACGAACTCAATCTTGGTCGGAGAGAGGAGTACGACGTGCTGGACAAG |
| | | CGGAGAGGACGGGACCCAGAAATGGGCGGGAAGCCGCGCAGAAAGAATCCC |
| | | CAAGAGGGCCTGTACAACGAGCTCCAAAAGGATAAGATGGCAGAAGCCTAT |
| | | AGCGAGATTGGTATGAAAGGGGAACGCAGAAGAGGCAAAGGCCACGACGGA |
| | | CTGTACCAGGGACTCAGCACCGCCACCAAGGACACCTATGACGCTCTTCAC |
| | | ATGCAGGCCCTGCCGCCTCGG |

139110

| | | |
|---|---|---|
| 139110- aa | 8560 | MALPVTALLLPLALLLHAARPQVQLVQSGGGLVKPGGSLRLSCAASGFTFS |
| Full CAR | | DYYMSWIRQAPGKGLEWVSYISSSGNTIYYADSVKGRFTISRDNAKNSLYL |
| | | QMNSLRAEDTAVYYCARSTMVREDYWGQGTLVTVSSASGGGGSGGRASGGG |
| | | GSDIVLTQSPLSLPVTLGQPASISCKSSESLVHNSGKTYLNWFHQRPGQSP |
| | | RRLIYEVSNRDSGVPDRFTGSGSGTDFTLKISRVEAEDVGVYYCMQGTHWP |
| | | GTFGQGTKLEIKTTTPAPRPPTPAPTIASQPLSLRPEACRPAAGGAVHTRG |
| | | LDFACDIYIWAPLAGTCGVLLLSLVITLYCKRGRKKLLYIFKQPEMRPVQT |
| | | TQEEDGCSCRFPEEEEGGCELRVKFSRSADAPAYKQGQNQLYNELNLGRRE |
| | | EYDVLDKRRGRDPEMGGKPRRKNPQEGLYNELQKDKMAEAYSEIGMKGERR |
| | | RGKGHDGLYQGLSTATKDTYDALHMQALPPR |
| 139110- nt | 8575 | ATGGCCCTCCCTGTCACCGCCCTGCTGCTTCCGCTGGCTCTTCTGCTCCAC |
| Full CAR | | GCCGCTCGGCCCCAAGTGCAACTGGTGCAAAGCGGAGGAGGATTGGTCAAA |
| | | CCCGGAGGAAGCCTGAGACTGTCATGCGCGGCCTCTGGATTCACCTTCTCC |
| | | GATTACTACATGTCATGGATCAGACAGGCCCCGGGGAAGGGCCTCGAATGG |
| | | GTGTCCTACATCTCGTCCTCCGGGAACACCATCTACTACGCCGACAGCGTG |
| | | AAGGGCCGCTTTACCATTTCCCGCGACAACGCAAAGAACTCGCTGTACCTT |
| | | CAGATGAATTCCCTGCGGGCTGAAGATACCGCGGTGTACTATTGCGCCCGG |
| | | TCCACTATGGTCCGGGAGGACTACTGGGGACAGGGCACACTCGTGACCGTG |
| | | TCCAGCGCGAGCGGGGGTGGAGGCAGCGGTGGACGCGCCTCCGGCGGCGGC |
| | | GGTTCAGACATCGTGCTGACTCAGTCGCCCCTGTCGCTGCCGGTCACCCTG |
| | | GGCCAACCGGCCTCAATTAGCTGCAAGTCCTCGGAGAGCCTGGTGCACAAC |
| | | TCAGGAAAGACTTACCTGAACTGGTTCCATCAGCGGCCTGGACAGTCCCCA |
| | | CGGAGGCTCATCTATGAAGTGTCCAACAGGGATTCGGGGGTGCCCGACCGC |
| | | TTCACTGGCTCCGGGTCCGGCACCGACTTCACCTTGAAAATCTCCAGAGTG |
| | | GAAGCCGAGGACGTGGGCGTGTACTACTGTATGCAGGGTACCCACTGGCCT |
| | | GGAACCTTTGGACAAGGAACTAAGCTCGAGATTAAGACCACTACCCCAGCA |
| | | CCGAGGCCACCCACCCCGGCTCCTACCATCGCCTCCCAGCCTCTGTCCCTG |
| | | CGTCCGGAGGCATGTAGACCCGCAGCTGGTGGGGCCGTGCATACCCGGGGT |
| | | CTTGACTTCGCCTGCGATATCTACATTTGGGCCCCTCTGGCTGGTACTTGC |
| | | GGGGTCCTGCTGCTTTCACTCGTGATCACTCTTTACTGTAAGCGCGGTCGG |
| | | AAGAAGCTGCTGTACATCTTTAAGCAACCCTTCATGAGGCCTGTGCAGACT |
| | | ACTCAAGAGGAGGACGGCTGTTCATGCCGGTTCCCAGAGGAGGAGGAAGGC |
| | | GGCTGCGAACTGCGCGTGAAATTCAGCCGCAGCGCAGATGCTCCAGCCTAC |
| | | AAGCAGGGGCAGAACCAGCTCTACAACGAACTCAATCTTGGTCGGAGAGAG |
| | | GAGTACGACGTGCTGGACAAGCGGAGAGGACGGGACCCAGAAATGGGGGG |
| | | AAGCCGCGCAGAAAGAATCCCCAAGAGGGCCTGTACAACGAGCTCCAAAAG |
| | | GATAAGATGGCAGAAGCCTATAGCGAGATTGGTATGAAAGGGGAACGCAGA |
| | | AGAGGCAAAGGCCACGACGGACTGTACCAGGGACTCAGCACCGCCACCAAG |
| | | GACACCTATGACGCTCTTCACATGCAGGCCCTGCCGCCTCGG |

139112

| | | |
|---|---|---|
| 139112- aa | 8561 | MALPVTALLLPLALLLHAARPQVQLVESGGGLVQPGGSLRLSCAVSGFALS |
| Full CAR | | NHGMSWVRRAPGKGLEWVSGIVYSGSTYYAASVKGRFTISRDNSRNTLYLQ |
| | | MNSLRPEDTAIYYCSAHGGESDVWGQGTTVTVSSASGGGGSGGRASGGGGS |
| | | DIRLTQSPSPLSASVGDRVTITCQASEDINKFLNWYHQTPGKAPKLLIYDA |
| | | STLQTGVPSRFSGSGSGTDFTLTINSLQPEDIGTYYCQQYESLPLTFGGGT |
| | | KVEIKTTTPAPRPPTPAPTIASQPLSLRPEACRPAAGGAVHTRGLDFACDI |
| | | YIWAPLAGTCGVLLLSLVITLYCKRGRKKLLYIFKQPEMRPVQTTQEEDGC |
| | | SCRFPEEEEGGCELRVKFSRSADAPAYKQGQNQLYNELNLGRREEYDVLDK |
| | | RRGRDPEMGGKPRRKNPQEGLYNELQKDKMAEAYSEIGMKGERRRGKGHDG |
| | | LYQGLSTATKDTYDALHMQALPPR |
| 139112- nt | 8576 | ATGGCCCTCCCTGTCACCGCCCTGCTGCTTCCGCTGGCTCTTCTGCTCCAC |
| Full CAR | | GCCGCTCGGCCCCAAGTGCAACTCGTGGAATCTGGTGGAGGACTCGTGCAA |
| | | CCCGGTGGAAGCCTTAGGCTGTCGTGCGCCGTCAGCGGGTTTGCTCTGAGC |
| | | AACCATGGAATGTCCTGGGTCCGCCGGGCACCGGGAAAAGGGCTGGAATGG |
| | | GTGTCCGGCATCGTGTACAGCGGGTCAACCTATTACGCCGCGTCCGTGAAG |
| | | GGCAGATTCACTATCTCAAGAGACAACAGCCGGAACACCCTGTACTTGCAA |
| | | ATGAATTCCCTGCGCCCCGAGGACACCGCCATCTACTACTGCTCCGCCCAC |
| | | GGAGGAGAGTCGGACGTGTGGGGCCAGGGAACGACTGTGACTGTGTCCAGC |
| | | GCATCAGGAGGGGGTGGTTCGGGCGGCCGGGCCTCGGGGGGAGGAGGTTCC |
| | | GACATTCGGCTGACCCAGTCCCCGTCCCCACTGTCGGCCTCCGTCGGCGAC |
| | | CGCGTGACCATCACTTGTCAGGCGTCCGAGGACATTAACAAGTTCCTGAAC |
| | | TGGTACCACCAGACCCCTGGAAAGGCCCCCAAGCTGCTGATCTACGATGCC |
| | | TCGACCCTTCAAACTGGAGTGCCTAGCCGGTTCTCCGGGTCCGGCTCCGGC |
| | | ACTGATTTCACTCTGACCATCAACTCATTGCAGCCGGAAGATATCGGGACC |
| | | TACTATTGCCAGCAGTACGAATCCCTCCCGCTCACATTCGGCGGGGGAACC |
| | | AAGGTCGAGATTAAGACCACTACCCCAGCACCGAGGCCACCCACCCCGGCT |
| | | CCTACCATCGCCTCCCAGCCTCTGTCCCTGCGTCCGGAGGCATGTAGACCC |
| | | GCAGCTGGTGGGGCCGTGCATACCCGGGGTCTTGACTTCGCCTGCGATATC |
| | | TACATTTGGGCCCCTCTGGCTGGTACTTGCGGGGTCCTGCTGCTTTCACTC |
| | | GTGATCACTCTTTACTGTAAGCGCGGTCGGAAGAAGCTGCTGTACATCTTT |
| | | AAGCAACCCTTCATGAGGCCTGTGCAGACTACTCAAGAGGAGGACGGCTGT |
| | | TCATGCCGGTTCCCAGAGGAGGAGGAAGGCGGCTGCGAACTGCGCGTGAAA |
| | | TTCAGCCGCAGCGCAGATGCTCCAGCCTACAAGCAGGGGCAGAACCAGCTC |
| | | TACAACGAACTCAATCTTGGTCGGAGAGAGGAGTACGACGTGCTGGACAAG |
| | | CGGAGAGGACGGGACCCAGAAATGGGCGGGAAGCCGCGCAGAAAGAATCCC |
| | | CAAGAGGGCCTGTACAACGAGCTCCAAAAGGATAAGATGGCAGAAGCCTAT |
| | | AGCGAGATTGGTATGAAAGGGGAACGCAGAAGAGGCAAAGGCCACGACGGA |
| | | CTGTACCAGGGACTCAGCACCGCCACCAAGGACACCTATGACGCTCTTCAC |
| | | ATGCAGGCCCTGCCGCCTCGG |

139113

| | | |
|---|---|---|
| 139113- aa | 8562 | MALPVTALLLPLALLLHAARPEVQLVETGGGLVQPGGSLRLSCAVSGFALS |
| Full CAR | | NHGMSWVRRAPGKGLEWVSGIVYSGSTYYAASVKGRFTISRDNSRNTLYLQ |
| | | MNSLRPEDTAIYYCSAHGGESDVWGQGTTVTVSSASGGGGSGGRASGGGGS |
| | | ETTLTQSPATLSVSPGERATLSCRASQSVGSNLAWYQQKPGQGPRLLIYGA |
| | | STRATGIPARFSGSGSGTEFTLTISSLQPEDFAVYYCQQYNDWLPVTFGQG |
| | | TKVEIKTTTPAPRPPTPAPTIASQPLSLRPEACRPAAGGAVHTRGLDFACD |
| | | IYIWAPLAGTCGVLLLSLVITLYCKRGRKKLLYIFKQPEMRPVQTTQEEDG |
| | | CSCRFPEEEEGGCELRVKFSRSADAPAYKQGQNQLYNELNLGRREEYDVLD |
| | | KRRGRDPEMGGKPRRKNPQEGLYNELQKDKMAEAYSEIGMKGERRRGKGHD |
| | | GLYQGLSTATKDTYDALHMQALPPR |
| 139113- nt | 8577 | ATGGCCCTCCCTGTCACCGCCCTGCTGCTTCCGCTGGCTCTTCTGCTCCAC |
| Full CAR | | GCCGCTCGGCCCGAAGTGCAATTGGTGGAAACTGGAGGAGGACTTGTGCAA |
| | | CCTGGAGGATCATTGCGGCTCTCATGCGCTGTCTCCGGCTTCGCCCTGTCA |
| | | AATCACGGGATGTCGTGGGTCAGACGGGCCCCGGGAAAGGGTCTGGAATGG |
| | | GTGTCGGGGATTGTGTACAGCGGCTCCACCTACTACGCCGCTTCGGTCAAG |
| | | GGCCGCTTCACTATTTCACGGGACAACAGCCGCAACACCCTCTATCTGCAA |
| | | ATGAACTCTCTCCGCCCGGAGGATACCGCCATCTACTACTGCTCCGCACAC |
| | | GGCGGCGAATCCGACGTGTGGGGACAGGGAACCACTGTCACCGTGTCGTCC |
| | | GCATCCGGTGGCGGAGGATCGGGTGGCCGGGCCTCCGGGGGCGGCGGCAGC |
| | | GAGACTACCCTGACCCAGTCCCCTGCCACTCTGTCCGTGAGCCCGGGAGAG |
| | | AGAGCCACCCTTAGCTGCCGGGCCAGCCAGAGCGTGGGCTCCAACCTGGCC |
| | | TGGTACCAGCAGAAGCCAGGACAGGGTCCCAGGCTGCTGATCTACGGAGCC |
| | | TCCACTCGCGCGACCGGCATCCCCGCGAGGTTCTCCGGGTCGGGTTCCGGG |
| | | ACCGAGTTCACCCTGACCATCTCCTCCCTCCAACCGGAGGACTTCGCGGTG |
| | | TACTACTGTCAGCAGTACAACGATTGGCTGCCCGTGACATTTGGACAGGGG |
| | | ACGAAGGTGGAAATCAAAACCACTACCCCAGCACCGAGGCCACCCACCCCG |
| | | GCTCCTACCATCGCCTCCCAGCCTCTGTCCCTGCGTCCGGAGGCATGTAGA |
| | | CCCGCAGCTGGTGGGGCCGTGCATACCCGGGGTCTTGACTTCGCCTGCGAT |
| | | ATCTACATTTGGGCCCCTCTGGCTGGTACTTGCGGGGTCCTGCTGCTTTCA |
| | | CTCGTGATCACTCTTTACTGTAAGCGCGGTCGGAAGAAGCTGCTGTACATC |
| | | TTTAAGCAACCCTTCATGAGGCCTGTGCAGACTACTCAAGAGGAGGACGGC |
| | | TGTTCATGCCGGTTCCCAGAGGAGGAGGAAGGCGGCTGCGAACTGCGCGTG |
| | | AAATTCAGCCGCAGCGCAGATGCTCCAGCCTACAAGCAGGGGCAGAACCAG |
| | | CTCTACAACGAACTCAATCTTGGTCGGAGAGAGGAGTACGACGTGCTGGAC |
| | | AAGCGGAGAGGACGGGACCCAGAAATGGGCGGGAAGCCGCGCAGAAAGAAT |
| | | CCCCAAGAGGGCCTGTACAACGAGCTCCAAAAGGATAAGATGGCAGAAGCC |
| | | TATAGCGAGATTGGTATGAAAGGGGAACGCAGAAGAGGCAAAGGCCACGAC |
| | | GGACTGTACCAGGGACTCAGCACCGCCACCAAGGACACCTATGACGCTCTT |
| | | CACATGCAGGCCCTGCCGCCTCGG |

139114

| | | |
|---|---|---|
| 139114- aa | 8563 | MALPVTALLLPLALLLHAARPEVQLVESGGGLVQPGGSLRLSCAVSGFALS |
| Full CAR | | NHGMSWVRRAPGKGLEWVSGIVYSGSTYYAASVKGRFTISRDNSRNTLYLQ |
| | | MNSLRPEDTAIYYCSAHGGESDVWGQGTTVTVSSASGGGGSGGRASGGGGS |
| | | EIVLTQSPGTLSLSPGERATLSCRASQSIGSSSLAWYQQKPGQAPRLLMYG |
| | | ASSRASGIPDRFSGSGSGTDFTLTISRLEPEDFAVYYCQQYAGSPPFTFGQ |
| | | GTKVEIKTTTPAPRPPTPAPTIASQPLSLRPEACRPAAGGAVHTRGLDFAC |
| | | DIYIWAPLAGTCGVLLLSLVITLYCKRGRKKLLYIFKQPFMRPVQTTQEED |
| | | GCSCRFPEEEEGGCELRVKFSRSADAPAYKQGQNQLYNELNLGRREEYDVL |
| | | DKRRGRDPEMGGKPRRKNPQEGLYNELQKDKMAEAYSEIGMKGERRRGKGH |
| | | DGLYQGLSTATKDTYDALHMQALPPR |
| 139114- nt | 8578 | ATGGCCCTCCCTGTCACCGCCCTGCTGCTTCCGCTGGCTCTTCTGCTCCAC |
| Full CAR | | GCCGCTCGGCCCGAAGTGCAATTGGTGGAATCTGGTGGAGGACTTGTGCAA |
| | | CCTGGAGGATCACTGAGACTGTCATGCGCGGTGTCCGGTTTTGCCCTGAGC |
| | | AATCATGGGATGTCGTGGGTCCGGCGCGCCCCCGGAAAGGGTCTGGAATGG |
| | | GTGTCGGGTATCGTCTACTCCGGGAGCACTTACTACGCCGCGAGCGTGAAG |
| | | GGCCGCTTCACCATTTCCCGCGATAACTCCCGCAACACCCTGTACTTGCAA |
| | | ATGAACTCGCTCCGGCCTGAGGACACTGCCATCTACTACTGCTCCGCACAC |
| | | GGAGGAGAATCCGACGTGTGGGGCCAGGGAACTACCGTGACCGTCAGCAGC |
| | | GCCTCCGGCGGCGGGGGCTCAGGCGGACGGGCTAGCGGCGGCGGTGGCTCC |
| | | GAGATCGTGCTGACCCAGTCGCCTGGCACTCTCTCGCTGAGCCCCGGGGAA |
| | | AGGGCAACCCTGTCCTGTCGGGCCAGCCAGTCCATTGGATCATCCTCCCTC |
| | | GCCTGGTATCAGCAGAAACCGGGACAGGCTCCGCGGCTGCTTATGTATGGG |
| | | GCCAGCTCAAGAGCCTCCGGCATTCCCGACCGGTTCTCCGGGTCCGGTTCC |
| | | GGCACCGATTTCACCCTGACTATCTCGAGGCTGGAGCCAGAGGACTTCGCC |
| | | GTGTACTACTGCCAGCAGTACGCGGGGTCCCCGCCGTTCACGTTCGGACAG |
| | | GGAACCAAGGTCGAGATCAAGACCACTACCCCAGCACCGAGGCCACCCACC |
| | | CCGGCTCCTACCATCGCCTCCCAGCCTCTGTCCCTGCGTCCGGAGGCATGT |
| | | AGACCCGCAGCTGGTGGGGCCGTGCATACCCGGGGTCTTGACTTCGCCTGC |
| | | GATATCTACATTTGGGCCCCTCTGGCTGGTACTTGCGGGGTCCTGCTGCTT |
| | | TCACTCGTGATCACTCTTTACTGTAAGCGCGGTCGGAAGAAGCTGCTGTAC |
| | | ATCTTTAAGCAACCCTTCATGAGGCCTGTGCAGACTACTCAAGAGGAGGAC |
| | | GGCTGTTCATGCCGGTTCCCAGAGGAGGAGGAAGGCGGCTGCGAACTGCGC |
| | | GTGAAATTCAGCCGCAGCGCAGATGCTCCAGCCTACAAGCAGGGGCAGAAC |
| | | CAGCTCTACAACGAACTCAATCTTGGTCGGAGAGAGGAGTACGACGTGCTG |
| | | GACAAGCGGAGAGGACGGGACCCAGAAATGGGCGGGAAGCCGCGCAGAAAG |
| | | AATCCCCAAGAGGGCCTGTACAACGAGCTCCAAAAGGATAAGATGGCAGAA |
| | | GCCTATAGCGAGATTGGTATGAAAGGGGAACGCAGAAGAGGCAAAGGCCAC |
| | | GACGGACTGTACCAGGGACTCAGCACCGCCACCAAGGACACCTATGACGCT |
| | | CTTCACATGCAGGCCCTGCCGCCTCGG |

149362

| | | |
|---|---|---|
| 149362-aa | 8579 | MALPVTALLLPLALLLHAARPQVQLQESGPGLVKPSETLSLTCTVSGGSIS |
| Full CAR | | SSYYYWGWIRQPPGKGLEWIGSIYYSGSAYYNPSLKSRVTISVDTSKNQFS |
| | | LRLSSVTAADTAVYYCARHWQEWPDAFDIWGQGTMVTVSSGGGGSGGGGSG |
| | | GGGSETTLTQSPAFMSATPGDKVIISCKASQDIDDAMNWYQQKPGEAPLFI |
| | | IQSATSPVPGIPPRFSGSGFGTDFSLTINNIESEDAAYYFCLQHDNFPLTF |
| | | GQGTKLEIKTTTPAPRPPTPAPTIASQPLSLRPEACRPAAGGAVHTRGLDF |
| | | ACDIYIWAPLAGTCGVLLLSLVITLYCKRGRKKLLYIFKQPFMRPVQTTQE |
| | | EDGCSCRFPEEEEGGCELRVKFSRSADAPAYKQGQNQLYNELNLGRREEYD |
| | | VLDKRRGRDPEMGGKPRRKNPQEGLYNELQKDKMAEAYSEIGMKGERRRGK |
| | | GHDGLYQGLSTATKDTYDALHMQALPPR |
| 149362-nt | 8601 | ATGGCCCTCCCTGTCACCGCCCTGCTGCTTCCGCTGGCTCTTCTGCTCCAC |
| Full CAR | | GCCGCTCGGCCCCAAGTGCAGCTTCAGGAAAGCGGACCGGGCCTGGTCAAG |
| | | CCATCCGAAACTCTCTCCCTGACTTGCACTGTGTCTGGCGGTTCCATCTCA |
| | | TCGTCGTACTACTACTGGGGCTGGATTAGGCAGCCGCCCGGAAAGGGACTG |
| | | GAGTGGATCGGAAGCATCTACTATTCCGGCTCGGCGTACTACAACCCTAGC |
| | | CTCAAGTCGAGAGTGACCATCTCCGTGGATACCTCCAAGAACCAGTTTTCC |
| | | CTGCGCCTGAGCTCCGTGACCGCCGCTGACACCGCCGTGTACTACTGTGCT |
| | | CGGCATTGGCAGGAATGGCCCGATGCCTTCGACATTTGGGGCCAGGGCACT |
| | | ATGGTCACTGTGTCATCCGGGGGTGGAGGCAGCGGGGGAGGAGGGTCCGGG |
| | | GGGGGAGGTTCAGAGACAACCTTGACCCAGTCACCCGCATTCATGTCCGCC |
| | | ACTCCGGGAGACAAGGTCATCATCTCGTGCAAAGCGTCCCAGGATATCGAC |
| | | GATGCCATGAATTGGTACCAGCAGAAGCCTGGCGAAGCGCCGCTGTTCATT |
| | | ATCCAATCCGCAACCTCGCCCGTGCCTGGAATCCCACCGCGGTTCAGCGGC |
| | | AGCGGTTTCGGAACCGACTTTTCCCTGACCATTAACAACATTGAGTCCGAG |
| | | GACGCCGCCTACTACTTCTGCCTGCAACACGACAACTTCCCTCTCACGTTC |
| | | GGCCAGGGAACCAAGCTGGAAATCAAGACCACTACCCCAGCACCGAGGCCA |
| | | CCCACCCCGGCTCCTACCATCGCCTCCCAGCCTCTGTCCCTGCGTCCGGAG |
| | | GCATGTAGACCCGCAGCTGGTGGGGCCGTGCATACCCGGGGTCTTGACTTC |
| | | GCCTGCGATATCTACATTTGGGCCCCTCTGGCTGGTACTTGCGGGGTCCTG |
| | | CTGCTTTCACTCGTGATCACTCTTTACTGTAAGCGCGGTCGGAAGAAGCTG |
| | | CTGTACATCTTTAAGCAACCCTTCATGAGGCCTGTGCAGACTACTCAAGAG |
| | | GAGGACGGCTGTTCATGCCGGTTCCCAGAGGAGGAGGAAGGCGGCTGCGAA |
| | | CTGCGCGTGAAATTCAGCCGCAGCGCAGATGCTCCAGCCTACAAGCAGGGG |
| | | CAGAACCAGCTCTACAACGAACTCAATCTTGGTCGGAGAGAGGAGTACGAC |
| | | GTGCTGGACAAGCGGAGAGGACGGGACCCAGAAATGGGCGGGAAGCCGCGC |
| | | AGAAAGAATCCCCAAGAGGGCCTGTACAACGAGCTCCAAAAGGATAAGATG |
| | | GCAGAAGCCTATAGCGAGATTGGTATGAAAGGGGAACGCAGAAGAGGCAAA |
| | | GGCCACGACGGACTGTACCAGGGACTCAGCACCGCCACCAAGGACACCTAT |
| | | GACGCTCTTCACATGCAGGCCCTGCCGCCTCGG |

149363

| | | |
|---|---|---|
| 149363-aa | 8580 | MALPVTALLLPLALLLHAARPQVNLRESGPALVKPTQTLTLTCTFSGFSLR |
| Full CAR | | TSGMCVSWIRQPPGKALEWLARIDWDEDKFYSTSLKTRLTISKDTSDNQVV |
| | | LRMTNMDPADTATYYCARSGAGGTSATAFDIWGPGTMVTVSSGGGGSGGGG |
| | | SGGGGSDIQMTQSPSSLSASVGDRVTITCRASQDIYNNLAWFQLKPGSAPR |
| | | SLMYAANKSQSGVPSRFSGSASGTDFTLTISSLQPEDFATYYCQHYYRFPY |
| | | SFGQGTKLEIKTTTPAPRPPTPAPTIASQPLSLRPEACRPAAGGAVHTRGL |
| | | DFACDIYIWAPLAGTCGVLLLSLVITLYCKRGRKKLLYIFKQPFMRPVQTT |
| | | QEEDGCSCRFPEEEEGGCELRVKFSRSADAPAYKQGQNQLYNELNLGRREE |
| | | YDVLDKRRGRDPEMGGKPRRKNPQEGLYNELQKDKMAEAYSEIGMKGERRR |
| | | GKGHDGLYQGLSTATKDTYDALHMQALPPR |
| 149363-nt | 8602 | ATGGCCCTCCCTGTCACCGCCCTGCTGCTTCCGCTGGCTCTTCTGCTCCAC |
| Full CAR | | GCCGCTCGGCCCCAAGTCAATCTGCGCGAATCCGGCCCCGCCTTGGTCAAG |
| | | CCTACCCAGACCCTCACTCTGACCTGTACTTTCTCCGGCTTCTCCCTGCGG |
| | | ACTTCCGGGATGTGCGTGTCCTGGATCAGACAGCCTCCGGGAAAGGCCCTG |
| | | GAGTGGCTCGCTCGCATTGACTGGGATGAGGACAAGTTCTACTCCACCTCA |
| | | CTCAAGACCAGGCTGACCATCAGCAAAGATACCTCTGACAACCAAGTGGTG |
| | | CTCCGCATGACCAACATGGACCCAGCCGACACTGCCACTTACTACTGCGCG |
| | | AGGAGCGGAGCGGGCGGAACCTCCGCCACCGCCTTCGATATTTGGGGCCCG |
| | | GGTACCATGGTCACCGTGTCAAGCGGAGGAGGGGGGTCCGGGGGCGGCGGT |
| | | TCCGGGGGAGGCGGATCGGACATTCAGATGACTCAGTCACCATCGTCCCTG |
| | | AGCGCTAGCGTGGGCGACAGAGTGACAATCACTTGCCGGGCATCCCAGGAC |
| | | ATCTATAACAACCTTGCGTGGTTCCAGCTGAAGCCTGGTTCCGCACCGCGG |
| | | TCACTTATGTACGCCGCCAACAAGAGCCAGTCGGGAGTGCCGTCCCGGTTT |
| | | TCCGGTTCGGCCTCGGGAACTGACTTCACCCTGACGATCTCCAGCCTGCAA |
| | | CCCGAGGATTTCGCCACCTACTACTGCCAGCACTACTACCGCTTTCCCTAC |
| | | TCGTTCGGACAGGGAACCAAGCTGGAAATCAAGACCACTACCCCAGCACCG |
| | | AGGCCACCCACCCCGGCTCCTACCATCGCCTCCCAGCCTCTGTCCCTGCGT |
| | | CCGGAGGCATGTAGACCCGCAGCTGGTGGGGCCGTGCATACCCGGGGTCTT |
| | | GACTTCGCCTGCGATATCTACATTTGGGCCCCTCTGGCTGGTACTTGCGGG |
| | | GTCCTGCTGCTTTCACTCGTGATCACTCTTTACTGTAAGCGCGGTCGGAAG |
| | | AAGCTGCTGTACATCTTTAAGCAACCCTTCATGAGGCCTGTGCAGACTACT |
| | | CAAGAGGAGGACGGCTGTTCATGCCGGTTCCCAGAGGAGGAGGAAGGCGGC |
| | | TGCGAACTGCGCGTGAAATTCAGCCGCAGCGCAGATGCTCCAGCCTACAAG |
| | | CAGGGGCAGAACCAGCTCTACAACGAACTCAATCTTGGTCGGAGAGAGGAG |
| | | TACGACGTGCTGGACAAGCGGAGAGGACGGGACCCAGAAATGGGCGGGAAG |
| | | CCGCGCAGAAAGAATCCCCAAGAGGGCCTGTACAACGAGCTCCAAAAGGAT |
| | | AAGATGGCAGAAGCCTATAGCGAGATTGGTATGAAAGGGGAACGCAGAAGA |
| | | GGCAAAGGCCACGACGGACTGTACCAGGGACTCAGCACCGCCACCAAGGAC |
| | | ACCTATGACGCTCTTCACATGCAGGCCCTGCCGCCTCGG |

149364

| | | |
|---|---|---|
| 149364-aa | 8581 | MALPVTALLLPLALLLHAARPEVQLVESGGGLVKPGGSLRLSCAASGFTFS |
| Full CAR | | SYSMNWVRQAPGKGLEWVSSISSSSSYIYYADSVKGRFTISRDNAKNSLYL |
| | | QMNSLRAEDTAVYYCAKTIAAVYAFDIWGQGTTVTVSSGGGGSGGGGSGGG |
| | | GSEIVLTQSPLSLPVTPEEPASISCRSSQSLLHSNGYNYLDWYLQKPGQSP |
| | | QLLIYLGSNRASGVPDRFSGSGSGTDFTLKISRVEAEDVGVYYCMQALQTP |
| | | YTFGQGTKLEIKTTTPAPRPPTPAPTIASQPLSLRPEACRPAAGGAVHTRG |
| | | LDFACDIYIWAPLAGTCGVLLLSLVITLYCKRGRKKLLYIFKQPEMRPVQT |
| | | TQEEDGCSCRFPEEEEGGCELRVKFSRSADAPAYKQGQNQLYNELNLGRRE |
| | | EYDVLDKRRGRDPEMGGKPRRKNPQEGLYNELQKDKMAEAYSEIGMKGERR |
| | | RGKGHDGLYQGLSTATKDTYDALHMQALPPR |
| 149364-nt | 8603 | ATGGCCCTCCCTGTCACCGCCCTGCTGCTTCCGCTGGCTCTTCTGCTCCAC |
| Full CAR | | GCCGCTCGGCCCGAAGTGCAGCTTGTCGAATCCGGGGGGGGACTGGTCAAG |
| | | CCGGGCGGATCACTGAGACTGTCCTGCGCCGCGAGCGGCTTCACGTTCTCC |
| | | TCCTACTCCATGAACTGGGTCCGCCAAGCCCCCGGGAAGGGACTGGAATGG |
| | | GTGTCCTCTATCTCCTCGTCGTCGTCCTACATCTACTACGCCGACTCCGTG |
| | | AAGGGAAGATTCACCATTTCCCGCGACAACGCAAAGAACTCACTGTACTTG |
| | | CAAATGAACTCACTCCGGGCCGAAGATACTGCTGTGTACTATTGCGCCAAG |
| | | ACTATTGCCGCCGTCTACGCTTTCGACATCTGGGGCCAGGGAACCACCGTG |
| | | ACTGTGTCGTCCGGTGGTGGTGGCTCGGGCGGAGGAGGAAGCGGCGGCGGG |
| | | GGGTCCGAGATTGTGCTGACCCAGTCGCCACTGAGCCTCCCTGTGACCCCC |
| | | GAGGAACCCGCCAGCATCAGCTGCCGGTCCAGCCAGTCCCTGCTCCACTCC |
| | | AACGGATACAATTACCTCGATTGGTACCTTCAGAAGCCTGGACAAAGCCCG |
| | | CAGCTGCTCATCTACTTGGGATCAAACCGCGCGTCAGGAGTGCCTGACCGG |
| | | TTCTCCGGCTCGGGCAGCGGTACCGATTTCACCCTGAAAATCTCCAGGGTG |
| | | GAGGCAGAGGACGTGGGAGTGTATTACTGTATGCAGGCGCTGCAGACTCCG |
| | | TACACATTTGGGCAGGGCACCAAGCTGGAGATCAAGACCACTACCCCAGCA |
| | | CCGAGGCCACCCACCCCGGCTCCTACCATCGCCTCCCAGCCTCTGTCCCTG |
| | | CGTCCGGAGGCATGTAGACCCGCAGCTGGTGGGGCCGTGCATACCCGGGGT |
| | | CTTGACTTCGCCTGCGATATCTACATTTGGGCCCCTCTGGCTGGTACTTGC |
| | | GGGGTCCTGCTGCTTTCACTCGTGATCACTCTTTACTGTAAGCGCGGTCGG |
| | | AAGAAGCTGCTGTACATCTTTAAGCAACCCTTCATGAGGCCTGTGCAGACT |
| | | ACTCAAGAGGAGGACGGCTGTTCATGCCGGTTCCCAGAGGAGGAGGAAGGC |
| | | GGCTGCGAACTGCGCGTGAAATTCAGCCGCAGCGCAGATGCTCCAGCCTAC |
| | | AAGCAGGGGCAGAACCAGCTCTACAACGAACTCAATCTTGGTCGGAGAGAG |
| | | GAGTACGACGTGCTGGACAAGCGGAGAGGACGGGACCCAGAAATGGGCGGG |
| | | AAGCCGCGCAGAAAGAATCCCCAAGAGGGCCTGTACAACGAGCTCCAAAAG |
| | | GATAAGATGGCAGAAGCCTATAGCGAGATTGGTATGAAAGGGGAACGCAGA |
| | | AGAGGCAAAGGCCACGACGGACTGTACCAGGGACTCAGCACCGCCACCAAG |
| | | GACACCTATGACGCTCTTCACATGCAGGCCCTGCCGCCTCGG |

149365

| | | |
|---|---|---|
| 149365-aa | 8582 | MALPVTALLLPLALLLHAARPEVQLVESGGGLVKPGGSLRLSCAASGFTFS |
| Full CAR | | DYYMSWIRQAPGKGLEWVSYISSSGSTIYYADSVKGRFTISRDNAKNSLYL |
| | | QMNSLRAEDTAVYYCARDLRGAFDIWGQGTMVTVSSGGGGSGGGGSGGGGS |
| | | SYVLTQSPSVSAAPGYTATISCGGNNIGTKSVHWYQQKPGQAPLLVIRDDS |
| | | VRPSKIPGRFSGSNSGNMATLTISGVQAGDEADFYCQVWDSDSEHVVFGGG |
| | | TKLTVLTTTPAPRPPTPAPTIASQPLSLRPEACRPAAGGAVHTRGLDFACD |
| | | IYIWAPLAGTCGVLLLSLVITLYCKRGRKKLLYIFKQPFMRPVQTTQEEDG |
| | | CSCRFPEEEEGGCELRVKFSRSADAPAYKQGQNQLYNELNLGRREEYDVLD |
| | | KRRGRDPEMGGKPRRKNPQEGLYNELQKDKMAEAYSEIGMKGERRRGKGHD |
| | | GLYQGLSTATKDTYDALHMQALPPR |
| 149365-nt | 8604 | ATGGCCCTCCCTGTCACCGCCCTGCTGCTTCCGCTGGCTCTTCTGCTCCAC |
| Full CAR | | GCCGCTCGGCCCGAAGTCCAGCTCGTGGAGTCCGGCGGAGGCCTTGTGAAG |
| | | CCTGGAGGTTCGCTGAGACTGTCCTGCGCCGCCTCCGGCTTCACCTTCTCC |
| | | GACTACTACATGTCCTGGATCAGACAGGCCCCGGGAAAGGGCCTGGAATGG |
| | | GTGTCCTACATCTCGTCATCGGGCAGCACTATCTACTACGCGGACTCAGTG |
| | | AAGGGGCGGTTCACCATTTCCCGGGATAACGCGAAGAACTCGCTGTATCTG |
| | | CAAATGAACTCACTGAGGGCCGAGGACACCGCCGTGTACTACTGCGCCCGC |
| | | GATCTCCGCGGGGCATTTGACATCTGGGGACAGGGAACCATGGTCACAGTG |
| | | TCCAGCGGAGGGGGAGGATCGGGTGGCGGAGGTTCCGGGGGTGGAGGCTCC |
| | | TCCTACGTGCTGACTCAGAGCCCAAGCGTCAGCGCTGCGCCCGGTTACACG |
| | | GCAACCATCTCCTGTGGCGGAAACAACATTGGGACCAAGTCTGTGCACTGG |
| | | TATCAGCAGAAGCCGGGCCAAGCTCCCCTGTTGGTGATCCGCGATGACTCC |
| | | GTGCGGCCTAGCAAAATTCCGGGACGGTTCTCCGGCTCCAACAGCGGCAAT |
| | | ATGGCCACTCTCACCATCTCGGGAGTGCAGGCCGGAGATGAAGCCGACTTC |
| | | TACTGCCAAGTCTGGGACTCAGACTCCGAGCATGTGGTGTTCGGGGGCGGA |
| | | ACCAAGCTGACTGTGCTCACCACTACCCCAGCACCGAGGCCACCCACCCCG |
| | | GCTCCTACCATCGCCTCCCAGCCTCTGTCCCTGCGTCCGGAGGCATGTAGA |
| | | CCCGCAGCTGGTGGGGCCGTGCATACCCGGGGTCTTGACTTCGCCTGCGAT |
| | | ATCTACATTTGGGCCCCTCTGGCTGGTACTTGCGGGGTCCTGCTGCTTTCA |
| | | CTCGTGATCACTCTTTACTGTAAGCGCGGTCGGAAGAAGCTGCTGTACATC |
| | | TTTAAGCAACCCTTCATGAGGCCTGTGCAGACTACTCAAGAGGAGGACGGC |
| | | TGTTCATGCCGGTTCCCAGAGGAGGAGGAAGGCGGCTGCGAACTGCGCGTG |
| | | AAATTCAGCCGCAGCGCAGATGCTCCAGCCTACAAGCAGGGGCAGAACCAG |
| | | CTCTACAACGAACTCAATCTTGGTCGGAGAGAGGAGTACGACGTGCTGGAC |
| | | AAGCGGAGAGGACGGGACCCAGAAATGGGCGGGAAGCCGCGCAGAAAGAAT |
| | | CCCCAAGAGGGCCTGTACAACGAGCTCCAAAAGGATAAGATGGCAGAAGCC |
| | | TATAGCGAGATTGGTATGAAAGGGGAACGCAGAAGAGGCAAAGGCCACGAC |
| | | GGACTGTACCAGGGACTCAGCACCGCCACCAAGGACACCTATGACGCTCTT |
| | | CACATGCAGGCCCTGCCGCCTCGG |

149366

| | | |
|---|---|---|
| 149366-aa | 8583 | MALPVTALLLPLALLLHAARPQVQLVQSGAEVKKPGASVKVSCKPSGYTVT |
| Full CAR | | SHYIHWVRRAPGQGLEWMGMINPSGGVTAYSQTLQGRVTMTSDTSSSTVYM |
| | | ELSSLRSEDTAMYYCAREGSGSGWYFDFWGRGTLVTVSSGGGGSGGGGSGG |
| | | GGSSYVLTQPPSVSVSPGQTASITCSGDGLSKKYVSWYQQKAGQSPVVLIS |
| | | RDKERPSGIPDRFSGSNSADTATLTISGTQAMDEADYYCQAWDDTTVVFGG |
| | | GTKLTVLTTTPAPRPPTPAPTIASQPLSLRPEACRPAAGGAVHTRGLDFAC |
| | | DIYIWAPLAGTCGVLLLSLVITLYCKRGRKKLLYIFKQPFMRPVQTTQEED |
| | | GCSCRFPEEEEGGCELRVKFSRSADAPAYKQGQNQLYNELNLGRREEYDVL |
| | | DKRRGRDPEMGGKPRRKNPQEGLYNELQKDKMAEAYSEIGMKGERRRGKGH |
| | | DGLYQGLSTATKDTYDALHMQALPPR |
| 149366-nt | 8605 | ATGGCCCTCCCTGTCACCGCCCTGCTGCTTCCGCTGGCTCTTCTGCTCCAC |
| Full CAR | | GCCGCTCGGCCCCAAGTGCAGCTGGTGCAGAGCGGGGCCGAAGTCAAGAAG |
| | | CCGGGAGCCTCCGTGAAAGTGTCCTGCAAGCCTTCGGGATACACCGTGACC |
| | | TCCCACTACATTCATTGGGTCCGCCGCGCCCCCGGCCAAGGACTCGAGTGG |
| | | ATGGGCATGATCAACCCTAGCGGCGGAGTGACCGCGTACAGCCAGACGCTG |
| | | CAGGGACGCGTGACTATGACCTCGGATACCTCCTCCTCCACCGTCTATATG |
| | | GAACTGTCCAGCCTGCGGTCCGAGGATACCGCCATGTACTACTGCGCCCGG |
| | | GAAGGATCAGGCTCCGGGTGGTATTTCGACTTCTGGGGAAGAGGCACCCTC |
| | | GTGACTGTGTCATCTGGGGGAGGGGGTTCCGGTGGTGGCGGATCGGGAGGA |
| | | GGCGGTTCATCCTACGTGCTGACCCAGCCACCCTCCGTGTCCGTGAGCCCC |
| | | GGCCAGACTGCATCGATTACATGTAGCGGCGACGGCCTCTCCAAGAAATAC |
| | | GTGTCGTGGTACCAGCAGAAGGCCGGACAGAGCCCGGTGGTGCTGATCTCA |
| | | AGAGATAAGGAGCGGCCTAGCGGAATCCCGGACAGGTTCTCGGGTTCCAAC |
| | | TCCGCGGACACTGCTACTCTGACCATCTCGGGGACCCAGGCTATGGACGAA |
| | | GCCGATTACTACTGCCAAGCCTGGGACGACACTACTGTCGTGTTTGGAGGG |
| | | GGCACCAAGTTGACCGTCCTTACCACTACCCCAGCACCGAGGCCACCCACC |
| | | CCGGCTCCTACCATCGCCTCCCAGCCTCTGTCCCTGCGTCCGGAGGCATGT |
| | | AGACCCGCAGCTGGTGGGGCCGTGCATACCCGGGGTCTTGACTTCGCCTGC |
| | | GATATCTACATTTGGGCCCCTCTGGCTGGTACTTGCGGGGTCCTGCTGCTT |
| | | TCACTCGTGATCACTCTTTACTGTAAGCGCGGTCGGAAGAAGCTGCTGTAC |
| | | ATCTTTAAGCAACCCTTCATGAGGCCTGTGCAGACTACTCAAGAGGAGGAC |
| | | GGCTGTTCATGCCGGTTCCCAGAGGAGGAGGAAGGCGGCTGCGAACTGCGC |
| | | GTGAAATTCAGCCGCAGCGCAGATGCTCCAGCCTACAAGCAGGGGCAGAAC |
| | | CAGCTCTACAACGAACTCAATCTTGGTCGGAGAGAGGAGTACGACGTGCTG |
| | | GACAAGCGGAGAGGACGGGACCCAGAAATGGGCGGGAAGCCGCGCAGAAAG |
| | | AATCCCCAAGAGGGCCTGTACAACGAGCTCCAAAAGGATAAGATGGCAGAA |
| | | GCCTATAGCGAGATTGGTATGAAAGGGGAACGCAGAAGAGGCAAAGGCCAC |
| | | GACGGACTGTACCAGGGACTCAGCACCGCCACCAAGGACACCTATGACGCT |
| | | CTTCACATGCAGGCCCTGCCGCCTCGG |

149367

| | | |
|---|---|---|
| 149367-aa | 8584 | MALPVTALLLPLALLLHAARPQVQLQESGPGLVKPSQTLSLTCTVSGGSIS |
| Full CAR | | SGGYYWSWIRQHPGKGLEWIGYIYYSGSTYYNPSLKSRVTISVDTSKNQFS |
| | | LKLSSVTAADTAVYYCARAGIAARLRGAFDIWGQGTMVTVSSGGGGSGGGG |
| | | SGGGGSDIVMTQSPSSVSASVGDRVIITCRASQGIRNWLAWYQQKPGKAPN |
| | | LLIYAASNLQSGVPSRFSGSGSGADFTLTISSLQPEDVATYYCQKYNSAPF |
| | | TFGPGTKVDIKTTTPAPRPPTPAPTIASQPLSLRPEACRPAAGGAVHTRGL |
| | | DFACDIYIWAPLAGTCGVLLLSLVITLYCKRGRKKLLYIFKQPFMRPVQTT |
| | | QEEDGCSCRFPEEEEGGCELRVKFSRSADAPAYKQGQNQLYNELNLGRREE |
| | | YDVLDKRRGRDPEMGGKPRRKNPQEGLYNELQKDKMAEAYSEIGMKGERRR |
| | | GKGHDGLYQGLSTATKDTYDALHMQALPPR |
| 149367-nt | 8606 | ATGGCCCTCCCTGTCACCGCCCTGCTGCTTCCGCTGGCTCTTCTGCTCCAC |
| Full CAR | | GCCGCTCGGCCCCAAGTGCAGCTTCAGGAGAGCGGCCCGGGACTCGTGAAG |
| | | CCGTCCCAGACCCTGTCCCTGACTTGCACCGTGTCGGGAGGAAGCATCTCG |
| | | AGCGGAGGCTACTATTGGTCGTGGATTCGGCAGCACCCTGGAAAGGGCCTG |
| | | GAATGGATCGGCTACATCTACTACTCCGGCTCGACCTACTACAACCCATCG |
| | | CTGAAGTCCAGAGTGACAATCTCAGTGGACACGTCCAAGAATCAGTTCAGC |
| | | CTGAAGCTCTCTTCCGTGACTGCGGCCGACACCGCCGTGTACTACTGCGCA |
| | | CGCGCTGGAATTGCCGCCCGGCTGAGGGGTGCCTTCGACATTTGGGGACAG |
| | | GGCACCATGGTCACCGTGTCCTCCGGCGGCGGAGGTTCCGGGGGTGGAGGC |
| | | TCAGGAGGAGGGGGGTCCGACATCGTCATGACTCAGTCGCCCTCAAGCGTC |
| | | AGCGCGTCCGTCGGGGACAGAGTGATCATCACCTGTCGGGCGTCCCAGGGA |
| | | ATTCGCAACTGGCTGGCCTGGTATCAGCAGAAGCCCGGAAAGGCCCCCAAC |
| | | CTGTTGATCTACGCCGCCTCAAACCTCCAATCCGGGGTGCCGAGCCGCTTC |
| | | AGCGGCTCCGGTTCGGGTGCCGATTTCACTCTGACCATCTCCTCCCTGCAA |
| | | CCTGAAGATGTGGCTACCTACTACTGCCAAAAGTACAACTCCGCACCTTTT |
| | | ACTTTCGGACCGGGGACCAAAGTGGACATTAAGACCACTACCCCAGCACCG |
| | | AGGCCACCCACCCCGGCTCCTACCATCGCCTCCCAGCCTCTGTCCCTGCGT |
| | | CCGGAGGCATGTAGACCCGCAGCTGGTGGGGCCGTGCATACCCGGGGTCTT |
| | | GACTTCGCCTGCGATATCTACATTTGGGCCCCTCTGGCTGGTACTTGCGGG |
| | | GTCCTGCTGCTTTCACTCGTGATCACTCTTTACTGTAAGCGCGGTCGGAAG |
| | | AAGCTGCTGTACATCTTTAAGCAACCCTTCATGAGGCCTGTGCAGACTACT |
| | | CAAGAGGAGGACGGCTGTTCATGCCGGTTCCCAGAGGAGGAGGAAGGCGGC |
| | | TGCGAACTGCGCGTGAAATTCAGCCGCAGCGCAGATGCTCCAGCCTACAAG |
| | | CAGGGGCAGAACCAGCTCTACAACGAACTCAATCTTGGTCGGAGAGAGGAG |
| | | TACGACGTGCTGGACAAGCGGAGAGGACGGGACCCAGAAATGGGCGGGAAG |
| | | CCGCGCAGAAAGAATCCCCAAGAGGGCCTGTACAACGAGCTCCAAAAGGAT |
| | | AAGATGGCAGAAGCCTATAGCGAGATTGGTATGAAAGGGGAACGCAGAAGA |
| | | GGCAAAGGCCACGACGGACTGTACCAGGGACTCAGCACCGCCACCAAGGAC |
| | | ACCTATGACGCTCTTCACATGCAGGCCCTGCCGCCTCGG |

149368

| | | |
|---|---|---|
| 149368-aa | 8585 | MALPVTALLLPLALLLHAARPQVQLVQSGAEVKKPGSSVKVSCKASGGTFS |
| Full CAR | | SYAISWVRQAPGQGLEWMGGIIPIFGTANYAQKFQGRVTITADESTSTAYM |
| | | ELSSLRSEDTAVYYCARRGGYQLLRWDVGLLRSAFDIWGQGTMVTVSSGGG |
| | | GSGGGGSGGGGSSYVLTQPPSVSVAPGQTARITCGGNNIGSKSVHWYQQKP |
| | | GQAPVLVLYGKNNRPSGVPDRFSGSRSGTTASLTITGAQAEDEADYYCSSR |
| | | DSSGDHLRVFGTGTKVTVLTTTPAPRPPTPAPTIASQPLSLRPEACRPAAG |
| | | GAVHTRGLDFACDIYIWAPLAGTCGVLLLSLVITLYCKRGRKKLLYIFKQP |
| | | FMRPVQTTQEEDGCSCRFPEEEEGGCELRVKFSRSADAPAYKQGQNQLYNE |
| | | LNLGRREEYDVLDKRRGRDPEMGGKPRRKNPQEGLYNELQKDKMAEAYSEI |
| | | GMKGERRRGKGHDGLYQGLSTATKDTYDALHMQALPPR |
| 149368-nt | 8607 | ATGGCCCTCCCTGTCACCGCCCTGCTGCTTCCGCTGGCTCTTCTGCTCCAC |
| Full CAR | | GCCGCTCGGCCCCAAGTGCAGCTGGTCCAGTCGGGCGCCGAGGTCAAGAAG |
| | | CCCGGGAGCTCTGTGAAAGTGTCCTGCAAGGCCTCCGGGGGCACCTTTAGC |
| | | TCCTACGCCATCTCCTGGGTCCGCCAAGCACCGGGTCAAGGCCTGGAGTGG |
| | | ATGGGGGGAATTATCCCTATCTTCGGCACTGCCAACTACGCCCAGAAGTTC |
| | | CAGGGACGCGTGACCATTACCGCGGACGAATCCACCTCCACCGCTTATATG |
| | | GAGCTGTCCAGCTTGCGCTCGGAAGATACCGCCGTGTACTACTGCGCCCGG |
| | | AGGGGTGGATACCAGCTGCTGAGATGGGACGTGGGCCTCCTGCGGTCGGCG |
| | | TTCGACATCTGGGGCCAGGGCACTATGGTCACTGTGTCCAGCGGAGGAGGC |
| | | GGATCGGGAGGCGGCGGATCAGGGGGAGGCGGTTCCAGCTACGTGCTTACT |
| | | CAACCCCCTTCGGTGTCCGTGGCCCCGGGACAGACCGCCAGAATCACTTGC |
| | | GGAGGAAACAACATTGGGTCCAAGAGCGTGCATTGGTACCAGCAGAAGCCA |
| | | GGACAGGCCCCTGTGCTGGTGCTCTACGGGAAGAACAATCGGCCCAGCGGA |
| | | GTGCCGGACAGGTTCTCGGGTTCACGCTCCGGTACAACCGCTTCACTGACT |
| | | ATCACCGGGGCCCAGGCAGAGGATGAAGCGGACTACTACTGTTCCTCCCGG |
| | | GATTCATCCGGCGACCACCTCCGGGTGTTCGGAACCGGAACGAAGGTCACC |
| | | GTGCTGACCACTACCCCAGCACCGAGGCCACCCACCCCGGCTCCTACCATC |
| | | GCCTCCCAGCCTCTGTCCCTGCGTCCGGAGGCATGTAGACCCGCAGCTGGT |
| | | GGGGCCGTGCATACCCGGGGTCTTGACTTCGCCTGCGATATCTACATTTGG |
| | | GCCCCTCTGGCTGGTACTTGCGGGGTCCTGCTGCTTTCACTCGTGATCACT |
| | | CTTTACTGTAAGCGCGGTCGGAAGAAGCTGCTGTACATCTTTAAGCAACCC |
| | | TTCATGAGGCCTGTGCAGACTACTCAAGAGGAGGACGGCTGTTCATGCCGG |
| | | TTCCCAGAGGAGGAGGAAGGCGGCTGCGAACTGCGCGTGAAATTCAGCCGC |
| | | AGCGCAGATGCTCCAGCCTACAAGCAGGGGCAGAACCAGCTCTACAACGAA |
| | | CTCAATCTTGGTCGGAGAGAGGAGTACGACGTGCTGGACAAGCGGAGAGGA |
| | | CGGGACCCAGAAATGGGCGGGAAGCCGCGCAGAAAGAATCCCCAAGAGGGC |
| | | CTGTACAACGAGCTCCAAAAGGATAAGATGGCAGAAGCCTATAGCGAGATT |
| | | GGTATGAAAGGGGAACGCAGAAGAGGCAAAGGCCACGACGGACTGTACCAG |
| | | GGACTCAGCACCGCCACCAAGGACACCTATGACGCTCTTCACATGCAGGCC |
| | | CTGCCGCCTCGG |

149369

| | | |
|---|---|---|
| 149369-aa | 8586 | MALPVTALLLPLALLLHAARPEVQLQQSGPGLVKPSQTLSLTCAISGDSVS |
| Full CAR | | SNSAAWNWIRQSPSRGLEWLGRTYYRSKWYSFYAISLKSRIIINPDTSKNQ |
| | | FSLQLKSVTPEDTAVYYCARSSPEGLFLYWFDPWGQGTLVTVSSGGDGSGG |
| | | GGSGGGGSSSELTQDPAVSVALGQTIRITCQGDSLGNYYATWYQQKPGQAP |
| | | VLVIYGTNNRPSGIPDRFSASSSGNTASLTITGAQAEDEADYYCNSRDSSG |
| | | HHLLFGTGTKVTVLTTTPAPRPPTPAPTIASQPLSLRPEACRPAAGGAVHT |
| | | RGLDFACDIYIWAPLAGTCGVLLLSLVITLYCKRGRKKLLYIFKQPFMRPV |
| | | QTTQEEDGCSCRFPEEEEGGCELRVKFSRSADAPAYKQGQNQLYNELNLGR |
| | | REEYDVLDKRRGRDPEMGGKPRRKNPQEGLYNELQKDKMAEAYSEIGMKGE |
| | | RRRGKGHDGLYQGLSTATKDTYDALHMQALPPR |
| 149369-nt | 8608 | ATGGCCCTCCCTGTCACCGCCCTGCTGCTTCCGCTGGCTCTTCTGCTCCAC |
| Full CAR | | GCCGCTCGGCCCGAAGTGCAGCTCCAACAGTCAGGACCGGGGCTCGTGAAG |
| | | CCATCCCAGACCCTGTCCCTGACTTGTGCCATCTCGGGAGATAGCGTGTCA |
| | | TCGAACTCCGCCGCCTGGAACTGGATTCGGCAGAGCCCGTCCCGCGGACTG |
| | | GAGTGGCTTGGAAGGACCTACTACCGGTCCAAGTGGTACTCTTTCTACGCG |
| | | ATCTCGCTGAAGTCCCGCATTATCATTAACCCTGATACCTCCAAGAATCAG |
| | | TTCTCCCTCCAACTGAAATCCGTCACCCCCGAGGACACAGCAGTGTATTAC |
| | | TGCGCACGGAGCAGCCCCGAAGGACTGTTCCTGTATTGGTTTGACCCCTGG |
| | | GGCCAGGGGACTCTTGTGACCGTGTCGAGCGGCGGAGATGGGTCCGGTGGC |
| | | GGTGGTTCGGGGGGCGGCGGATCATCATCCGAACTGACCCAGGACCCGGCT |
| | | GTGTCCGTGGCGCTGGGACAAACCATCCGCATTACGTGCCAGGGAGACTCC |
| | | CTGGGCAACTACTACGCCACTTGGTACCAGCAGAAGCCGGGCCAAGCCCCT |
| | | GTGTTGGTCATCTACGGGACCAACAACAGACCTTCCGGCATCCCCGACCGG |
| | | TTCAGCGCTTCGTCCTCCGGCAACACTGCCAGCCTGACCATCACTGGAGCG |
| | | CAGGCCGAAGATGAGGCCGACTACTACTGCAACAGCAGAGACTCCTCGGGT |
| | | CATCACCTCTTGTTCGGAACTGGAACCAAGGTCACCGTGCTGACCACTACC |
| | | CCAGCACCGAGGCCACCCACCCCGGCTCCTACCATCGCCTCCCAGCCTCTG |
| | | TCCCTGCGTCCGGAGGCATGTAGACCCGCAGCTGGTGGGGCCGTGCATACC |
| | | CGGGGTCTTGACTTCGCCTGCGATATCTACATTTGGGCCCCTCTGGCTGGT |
| | | ACTTGCGGGGTCCTGCTGCTTTCACTCGTGATCACTCTTTACTGTAAGCGC |
| | | GGTCGGAAGAAGCTGCTGTACATCTTTAAGCAACCCTTCATGAGGCCTGTG |
| | | CAGACTACTCAAGAGGAGGACGGCTGTTCATGCCGGTTCCCAGAGGAGGAG |
| | | GAAGGCGGCTGCGAACTGCGCGTGAAATTCAGCCGCAGCGCAGATGCTCCA |
| | | GCCTACAAGCAGGGGCAGAACCAGCTCTACAACGAACTCAATCTTGGTCGG |
| | | AGAGAGGAGTACGACGTGCTGGACAAGCGGAGAGGACGGGACCCAGAAATG |
| | | GGCGGGAAGCCGCGCAGAAAGAATCCCCAAGAGGGCCTGTACAACGAGCTC |
| | | CAAAAGGATAAGATGGCAGAAGCCTATAGCGAGATTGGTATGAAAGGGGAA |
| | | CGCAGAAGAGGCAAAGGCCACGACGGACTGTACCAGGGACTCAGCACCGCC |
| | | ACCAAGGACACCTATGACGCTCTTCACATGCAGGCCCTGCCGCCTCGG |

BCMA_EBB-C1978-A4

| | | |
|---|---|---|
| BCMA_EBB- | 8587 | MALPVTALLLPLALLLHAARPEVQLVESGGGLVQPGGSLRLSCAASGFTFS |
| C1978-A4 - | | SYAMSWVRQAPGKGLEWVSAISGSGGSTYYADSVKGRFTISRDNSKNTLYL |
| aa | | QMNSLRAEDTAVYYCAKVEGSGSLDYWGQGTLVTVSSGGGGSGGGGSGGGG |
| Full CAR | | SEIVMTQSPGTLSLSPGERATLSCRASQSVSSAYLAWYQQKPGQPPRLLIS |
| | | GASTRATGIPDRFGGSGSGTDFTLTISRLEPEDFAVYYCQHYGSSFNGSSL |
| | | FTFGQGTRLEIKTTTPAPRPPTPAPTIASQPLSLRPEACRPAAGGAVHTRG |
| | | LDFACDIYIWAPLAGTCGVLLLSLVITLYCKRGRKKLLYIFKQPFMRPVQT |
| | | TQEEDGCSCRFPEEEEGGCELRVKFSRSADAPAYKQGQNQLYNELNLGRRE |
| | | EYDVLDKRRGRDPEMGGKPRRKNPQEGLYNELQKDKMAEAYSEIGMKGERR |
| | | RGKGHDGLYQGLSTATKDTYDALHMQALPPR |
| BCMA_EBB- | 8609 | ATGGCCCTCCCTGTCACCGCCCTGCTGCTTCCGCTGGCTCTTCTGCTCCAC |
| C1978-A4 | | GCCGCTCGGCCCGAAGTGCAGCTCGTGGAGTCAGGAGGCGGCCTGGTCCAG |
| nt | | CCGGGAGGGTCCCTTAGACTGTCATGCGCCGCAAGCGGATTCACTTTCTCC |
| Full CAR | | TCCTATGCCATGAGCTGGGTCCGCCAAGCCCCCGGAAAGGGACTGGAATGG |
| | | GTGTCCGCCATCTCGGGGTCTGGAGGCTCAACTTACTACGCTGACTCCGTG |
| | | AAGGGACGGTTCACCATTAGCCGCGACAACTCCAAGAACACCCTCTACCTC |
| | | CAAATGAACTCCCTGCGGGCCGAGGATACCGCCGTCTACTACTGCGCCAAA |
| | | GTGGAAGGTTCAGGATCGCTGGACTACTGGGGACAGGGTACTCTCGTGACC |
| | | GTGTCATCGGGCGGAGGAGGTTCCGGCGGTGGCGGCTCCGGCGGCGGAGGG |
| | | TCGGAGATCGTGATGACCCAGAGCCCTGGTACTCTGAGCCTTTCGCCGGGA |
| | | GAAAGGGCCACCCTGTCCTGCCGCGCTTCCCAATCCGTGTCCTCCGCGTAC |
| | | TTGGCGTGGTACCAGCAGAAGCCGGGACAGCCCCCTCGGCTGCTGATCAGC |
| | | GGGGCCAGCACCCGGGCAACCGGAATCCCAGACAGATTCGGGGGTTCCGGC |
| | | AGCGGCACAGATTTCACCCTGACTATTTCGAGGTTGGAGCCCGAGGACTTT |
| | | GCGGTGTATTACTGTCAGCACTACGGGTCGTCCTTTAATGGCTCCAGCCTG |
| | | TTCACGTTCGGACAGGGGACCCGCCTGGAAATCAAGACCACTACCCCAGCA |
| | | CCGAGGCCACCCACCCCGGCTCCTACCATCGCCTCCCAGCCTCTGTCCCTG |
| | | CGTCCGGAGGCATGTAGACCCGCAGCTGGTGGGGCCGTGCATACCCGGGGT |
| | | CTTGACTTCGCCTGCGATATCTACATTTGGGCCCCTCTGGCTGGTACTTGC |
| | | GGGGTCCTGCTGCTTTCACTCGTGATCACTCTTTACTGTAAGCGCGGTCGG |
| | | AAGAAGCTGCTGTACATCTTTAAGCAACCCTTCATGAGGCCTGTGCAGACT |
| | | ACTCAAGAGGAGGACGGCTGTTCATGCCGGTTCCCAGAGGAGGAGGAAGGC |
| | | GGCTGCGAACTGCGCGTGAAATTCAGCCGCAGCGCAGATGCTCCAGCCTAC |
| | | AAGCAGGGGCAGAACCAGCTCTACAACGAACTCAATCTTGGTCGGAGAGAG |
| | | GAGTACGACGTGCTGGACAAGCGGAGAGGACGGGACCCAGAAATGGGCGGG |
| | | AAGCCGCGCAGAAAGAATCCCCAAGAGGGCCTGTACAACGAGCTCCAAAAG |
| | | GATAAGATGGCAGAAGCCTATAGCGAGATTGGTATGAAAGGGGAACGCAGA |
| | | AGAGGCAAAGGCCACGACGGACTGTACCAGGGACTCAGCACCGCCACCAAG |
| | | GACACCTATGACGCTCTTCACATGCAGGCCCTGCCGCCTCGG |

BCMA_EBB-C1978-G1

| | | |
|---|---|---|
| BCMA_EBB- | 8588 | MALPVTALLLPLALLLHAARPEVQLVETGGGLVQPGGSLRLSCAASGITFS |
| C1978-G1 - | | RYPMSWVRQAPGKGLEWVSGISDSGVSTYYADSAKGRFTISRDNSKNTLFL |
| aa | | QMSSLRDEDTAVYYCVTRAGSEASDIWGQGTMVTVSSGGGGSGGGGSGGGG |
| Full CAR | | SEIVLTQSPATLSLSPGERATLSCRASQSVSNSLAWYQQKPGQAPRLLIYD |
| | | ASSRATGIPDRFSGSGSGTDFTLTISRLEPEDFAIYYCQQFGTSSGLTFGG |
| | | GTKLEIKTTTPAPRPPTPAPTIASQPLSLRPEACRPAAGGAVHTRGLDFAC |
| | | DIYIWAPLAGTCGVLLLSLVITLYCKRGRKKLLYIFKQPFMRPVQTTQEED |
| | | GCSCRFPEEEEGGCELRVKFSRSADAPAYKQGQNQLYNELNLGRREEYDVL |
| | | DKRRGRDPEMGGKPRRKNPQEGLYNELQKDKMAEAYSEIGMKGERRRGKGH |
| | | DGLYQGLSTATKDTYDALHMQALPPR |
| BCMA_EBB- | 8610 | ATGGCCCTCCCTGTCACCGCCCTGCTGCTTCCGCTGGCTCTTCTGCTCCAC |
| C1978-G1 - | | GCCGCTCGGCCCGAAGTGCAACTGGTGGAAACCGGTGGCGGCCTGGTGCAG |
| nt | | CCTGGAGGATCATTGAGGCTGTCATGCGCGGCCAGCGGTATTACCTTCTCC |
| Full CAR | | CGGTACCCCATGTCCTGGGTCAGACAGGCCCCGGGGAAAGGGCTTGAATGG |
| | | GTGTCCGGGATCTCGGACTCCGGTGTCAGCACTTACTACGCCGACTCCGCC |
| | | AAGGGACGCTTCACCATTTCCCGGGACAACTCGAAGAACACCCTGTTCCTC |
| | | CAAATGAGCTCCCTCCGGGACGAGGATACTGCAGTGTACTACTGCGTGACC |
| | | CGCGCCGGGTCCGAGGCGTCTGACATTTGGGGACAGGGCACTATGGTCACC |
| | | GTGTCGTCCGGCGGAGGGGGCTCGGGAGGCGGTGGCAGCGGAGGAGGAGGG |
| | | TCCGAGATCGTGCTGACCCAATCCCCGGCCACCCTCTCGCTGAGCCCTGGA |
| | | GAAAGGGCAACCTTGTCCTGTCGCGCGAGCCAGTCCGTGAGCAACTCCCTG |
| | | GCCTGGTACCAGCAGAAGCCCGGACAGGCTCCGAGACTTCTGATCTACGAC |
| | | GCTTCGAGCCGGGCCACTGGAATCCCCGACCGCTTTTCGGGGTCCGGCTCA |
| | | GGAACCGATTTCACCCTGACAATCTCACGGCTGGAGCCAGAGGATTTCGCC |
| | | ATCTATTACTGCCAGCAGTTCGGTACTTCCTCCGGCCTGACTTTCGGAGGC |
| | | GGCACGAAGCTCGAAATCAAGACCACTACCCCAGCACCGAGGCCACCCACC |
| | | CCGGCTCCTACCATCGCCTCCCAGCCTCTGTCCCTGCGTCCGGAGGCATGT |
| | | AGACCCGCAGCTGGTGGGGCCGTGCATACCCGGGGTCTTGACTTCGCCTGC |
| | | GATATCTACATTTGGGCCCCTCTGGCTGGTACTTGCGGGGTCCTGCTGCTT |
| | | TCACTCGTGATCACTCTTTACTGTAAGCGCGGTCGGAAGAAGCTGCTGTAC |
| | | ATCTTTAAGCAACCCTTCATGAGGCCTGTGCAGACTACTCAAGAGGAGGAC |
| | | GGCTGTTCATGCCGGTTCCCAGAGGAGGAGGAAGGCGGCTGCGAACTGCGC |
| | | GTGAAATTCAGCCGCAGCGCAGATGCTCCAGCCTACAAGCAGGGGCAGAAC |
| | | CAGCTCTACAACGAACTCAATCTTGGTCGGAGAGAGGAGTACGACGTGCTG |
| | | GACAAGCGGAGAGGACGGGACCCAGAAATGGGCGGGAAGCCGCGCAGAAAG |
| | | AATCCCCAAGAGGGCCTGTACAACGAGCTCCAAAAGGATAAGATGGCAGAA |
| | | GCCTATAGCGAGATTGGTATGAAAGGGGAACGCAGAAGAGGCAAAGGCCAC |
| | | GACGGACTGTACCAGGGACTCAGCACCGCCACCAAGGACACCTATGACGCT |
| | | CTTCACATGCAGGCCCTGCCGCCTCGG |

BCMA_EBB-C1979-C1

| | | |
|---|---|---|
| BCMA_EBB- | 8589 | MALPVTALLLPLALLLHAARPQVQLVESGGGLVQPGGSLRLSCAASGFTFS |
| C1979-C1 - | | SYAMSWVRQAPGKGLEWVSAISGSGGSTYYADSVKGRFTISRDNAKNSLYL |
| aa | | QMNSLRAEDTAIYYCARATYKRELRYYYGMDVWGQGTMVTVSSGGGGSGGG |
| Full CAR | | GSGGGGSEIVMTQSPGTVSLSPGERATLSCRASQSVSSSFLAWYQQKPGQA |
| | | PRLLIYGASSRATGIPDRFSGSGSGTDFTLTISRLEPEDSAVYYCQQYHSS |
| | | PSWTFGQGTRLEIKTTTPAPRPPTPAPTIASQPLSLRPEACRPAAGGAVHT |
| | | RGLDFACDIYIWAPLAGTCGVLLLSLVITLYCKRGRKKLLYIFKQPFMRPV |
| | | QTTQEEDGCSCRFPEEEEGGCELRVKFSRSADAPAYKQGQNQLYNELNLGR |
| | | REEYDVLDKRRGRDPEMGGKPRRKNPQEGLYNELQKDKMAEAYSEIGMKGE |
| | | RRRGKGHDGLYQGLSTATKDTYDALHMQALPPR |
| BCMA_EBB- | 8611 | ATGGCCCTCCCTGTCACCGCCCTGCTGCTTCCGCTGGCTCTTCTGCTCCAC |
| C1979-C1 - | | GCCGCTCGGCCCCAAGTGCAGCTCGTGGAATCGGGTGGCGGACTGGTGCAG |
| nt | | CCGGGGGGCTCACTTAGACTGTCCTGCGCGGCCAGCGGATTCACTTTCTCC |
| Full CAR | | TCCTACGCCATGTCCTGGGTCAGACAGGCCCCTGGAAAGGGCCTGGAATGG |
| | | GTGTCCGCAATCAGCGGCAGCGGCGGCTCGACCTATTACGCGGATTCAGTG |
| | | AAGGGCAGATTCACCATTTCCCGGGACAACGCCAAGAACTCCTTGTACCTT |
| | | CAAATGAACTCCCTCCGCGCGGAAGATACCGCAATCTACTACTGCGCTCGG |
| | | GCCACTTACAAGAGGGAACTGCGCTACTACTACGGGATGGACGTCTGGGGC |
| | | CAGGGAACCATGGTCACCGTGTCCAGCGGAGGAGGAGGATCGGGAGGAGGC |
| | | GGTAGCGGGGGTGGAGGGTCGGAGATCGTGATGACCCAGTCCCCCGGCACT |
| | | GTGTCGCTGTCCCCCGGCGAACGGGCCACCCTGTCATGTCGGGCCAGCCAG |
| | | TCAGTGTCGTCAAGCTTCCTCGCCTGGTACCAGCAGAAACCGGGACAAGCT |
| | | CCCCGCCTGCTGATCTACGGAGCCAGCAGCCGGGCCACCGGTATTCCTGAC |
| | | CGGTTCTCCGGTTCGGGGTCCGGGACCGACTTTACTCTGACTATCTCTCGC |
| | | CTCGAGCCAGAGGACTCCGCCGTGTATTACTGCCAGCAGTACCACTCCTCC |
| | | CCGTCCTGGACGTTCGGACAGGGCACAAGGCTGGAGATTAAGACCACTACC |
| | | CCAGCACCGAGGCCACCCACCCCGGCTCCTACCATCGCCTCCCAGCCTCTG |
| | | TCCCTGCGTCCGGAGGCATGTAGACCCGCAGCTGGTGGGGCCGTGCATACC |
| | | CGGGGTCTTGACTTCGCCTGCGATATCTACATTTGGGCCCCTCTGGCTGGT |
| | | ACTTGCGGGGTCCTGCTGCTTTCACTCGTGATCACTCTTTACTGTAAGCGC |
| | | GGTCGGAAGAAGCTGCTGTACATCTTTAAGCAACCCTTCATGAGGCCTGTG |
| | | CAGACTACTCAAGAGGAGGACGGCTGTTCATGCCGGTTCCCAGAGGAGGAG |
| | | GAAGGCGGCTGCGAACTGCGCGTGAAATTCAGCCGCAGCGCAGATGCTCCA |
| | | GCCTACAAGCAGGGGCAGAACCAGCTCTACAACGAACTCAATCTTGGTCGG |
| | | AGAGAGGAGTACGACGTGCTGGACAAGCGGAGAGGACGGGACCCAGAAATG |
| | | GGCGGGAAGCCGCGCAGAAAGAATCCCCAAGAGGGCCTGTACAACGAGCTC |
| | | CAAAAGGATAAGATGGCAGAAGCCTATAGCGAGATTGGTATGAAAGGGGAA |
| | | CGCAGAAGAGGCAAAGGCCACGACGGACTGTACCAGGGACTCAGCACCGCC |
| | | ACCAAGGACACCTATGACGCTCTTCACATGCAGGCCCTGCCGCCTCGG |

BCMA_EBB-C1978-C7

| | | |
|---|---|---|
| BCMA_EBB- | 8590 | MALPVTALLLPLALLLHAARPEVQLVETGGGLVQPGGSLRLSCAASGFTFS |
| C1978-C7 - | | SYAMSWVRQAPGKGLEWVSAISGSGGSTYYADSVKGRFTISRDNSKNTLYL |
| aa | | QMNTLKAEDTAVYYCARATYKRELRYYYGMDVWGQGTTVTVSSGGGGSGGG |
| Full CAR | | GSGGGGSEIVLTQSPSTLSLSPGESATLSCRASQSVSTTFLAWYQQKPGQA |
| | | PRLLIYGSSNRATGIPDRFSGSGSGTDFTLTIRRLEPEDFAVYYCQQYHSS |
| | | PSWTFGQGTKVEIKTTTPAPRPPTPAPTIASQPLSLRPEACRPAAGGAVHT |
| | | RGLDFACDIYIWAPLAGTCGVLLLSLVITLYCKRGRKKLLYIFKQPFMRPV |
| | | QTTQEEDGCSCRFPEEEEGGCELRVKFSRSADAPAYKQGQNQLYNELNLGR |
| | | REEYDVLDKRRGRDPEMGGKPRRKNPQEGLYNELQKDKMAEAYSEIGMKGE |
| | | RRRGKGHDGLYQGLSTATKDTYDALHMQALPPR |
| BCMA_EBB- | 8612 | ATGGCCCTCCCTGTCACCGCCCTGCTGCTTCCGCTGGCTCTTCTGCTCCAC |
| C1978-C7 - | | GCCGCTCGGCCCGAGGTGCAGCTTGTGGAAACCGGTGGCGGACTGGTGCAG |
| nt | | CCCGGAGGAAGCCTCAGGCTGTCCTGCGCCGCGTCCGGCTTCACCTTCTCC |
| Full CAR | | TCGTACGCCATGTCCTGGGTCCGCCAGGCCCCCGGAAAGGGCCTGGAATGG |
| | | GTGTCCGCCATCTCTGGAAGCGGAGGTTCCACGTACTACGCGGACAGCGTC |
| | | AAGGGAAGGTTCACAATCTCCCGCGATAATTCGAAGAACACTCTGTACCTT |
| | | CAAATGAACACCCTGAAGGCCGAGGACACTGCTGTGTACTACTGCGCACGG |
| | | GCCACCTACAAGAGAGAGCTCCGGTACTACTACGGAATGGACGTCTGGGGC |
| | | CAGGGAACTACTGTGACCGTGTCCTCGGGAGGGGGTGGCTCCGGGGGGGGC |
| | | GGCTCCGGCGGAGGCGGTTCCGAGATTGTGCTGACCCAGTCACCTTCAACT |
| | | CTGTCGCTGTCCCCGGGAGAGAGCGCTACTCTGAGCTGCCGGGCCAGCCAG |
| | | TCCGTGTCCACCACCTTCCTCGCCTGGTATCAGCAGAAGCCGGGGCAGGCA |
| | | CCACGGCTCTTGATCTACGGGTCAAGCAACAGAGCGACCGGAATTCCTGAC |
| | | CGCTTCTCGGGGAGCGGTTCAGGCACCGACTTCACCCTGACTATCCGGCGC |
| | | CTGGAACCCGAAGATTTCGCCGTGTATTACTGTCAACAGTACCACTCCTCG |
| | | CCGTCCTGGACCTTTGGCCAAGGAACCAAAGTGGAAATCAAGACCACTACC |
| | | CCAGCACCGAGGCCACCCACCCCGGCTCCTACCATCGCCTCCCAGCCTCTG |
| | | TCCCTGCGTCCGGAGGCATGTAGACCCGCAGCTGGTGGGGCCGTGCATACC |
| | | CGGGGTCTTGACTTCGCCTGCGATATCTACATTTGGGCCCCTCTGGCTGGT |
| | | ACTTGCGGGGTCCTGCTGCTTTCACTCGTGATCACTCTTTACTGTAAGCGC |
| | | GGTCGGAAGAAGCTGCTGTACATCTTTAAGCAACCCTTCATGAGGCCTGTG |
| | | CAGACTACTCAAGAGGAGGACGGCTGTTCATGCCGGTTCCCAGAGGAGGAG |
| | | GAAGGCGGCTGCGAACTGCGCGTGAAATTCAGCCGCAGCGCAGATGCTCCA |
| | | GCCTACAAGCAGGGGCAGAACCAGCTCTACAACGAACTCAATCTTGGTCGG |
| | | AGAGAGGAGTACGACGTGCTGGACAAGCGGAGAGGACGGGACCCAGAAATG |
| | | GGCGGGAAGCCGCGCAGAAAGAATCCCCAAGAGGGCCTGTACAACGAGCTC |
| | | CAAAAGGATAAGATGGCAGAAGCCTATAGCGAGATTGGTATGAAAGGGGAA |
| | | CGCAGAAGAGGCAAAGGCCACGACGGACTGTACCAGGGACTCAGCACCGCC |
| | | ACCAAGGACACCTATGACGCTCTTCACATGCAGGCCCTGCCGCCTCGG |

BCMA_EBB-C1978-D10

| | | |
|---|---|---|
| BCMA_EBB- | 8591 | MALPVTALLLPLALLLHAARPEVQLVETGGGLVQPGRSLRLSCAASGFTFD |
| C1978-D10 - | | DYAMHWVRQAPGKGLEWVSGISWNSGSIGYADSVKGRFTISRDNAKNSLYL |
| aa | | QMNSLRDEDTAVYYCARVGKAVPDVWGQGTTVTVSSGGGGSGGGGSGGGGS |
| Full CAR | | DIVMTQTPSSLSASVGDRVTITCRASQSISSYLNWYQQKPGKAPKLLIYAA |
| | | SSLQSGVPSRFSGSGSGTDFTLTISSLQPEDFATYYCQQSYSTPYSFGQGT |
| | | RLEIKTTTPAPRPPTPAPTIASQPLSLRPEACRPAAGGAVHTRGLDFACDI |
| | | YIWAPLAGTCGVLLLSLVITLYCKRGRKKLLYIFKQPFMRPVQTTQEEDGC |
| | | SCRFPEEEEGGCELRVKFSRSADAPAYKQGQNQLYNELNLGRREEYDVLDK |
| | | RRGRDPEMGGKPRRKNPQEGLYNELQKDKMAEAYSEIGMKGERRRGKGHDG |
| | | LYQGLSTATKDTYDALHMQALPPR |
| BCMA_EBB- | 8613 | ATGGCCCTCCCTGTCACCGCCCTGCTGCTTCCGCTGGCTCTTCTGCTCCAC |
| C1978-D10 - | | GCCGCTCGGCCCGAAGTGCAGCTCGTGGAAACTGGAGGTGGACTCGTGCAG |
| nt | | CCTGGACGGTCGCTGCGGCTGAGCTGCGCTGCATCCGGCTTCACCTTCGAC |
| Full CAR | | GATTATGCCATGCACTGGGTCAGACAGGCGCCAGGGAAGGGACTTGAGTGG |
| | | GTGTCCGGTATCAGCTGGAATAGCGGCTCAATCGGATACGCGGACTCCGTG |
| | | AAGGGAAGGTTCACCATTTCCCGCGACAACGCCAAGAACTCCCTGTACTTG |
| | | CAAATGAACAGCCTCCGGGATGAGGACACTGCCGTGTACTACTGCGCCCGC |
| | | GTCGGAAAAGCTGTGCCCGACGTCTGGGGCCAGGGAACCACTGTGACCGTG |
| | | TCCAGCGGCGGGGGTGGATCGGGCGGTGGAGGGTCCGGTGGAGGGGGCTCA |
| | | GATATTGTGATGACCCAGACCCCCTCGTCCCTGTCCGCCTCGGTCGGCGAC |
| | | CGCGTGACTATCACATGTAGAGCCTCGCAGAGCATCTCCAGCTACCTGAAC |
| | | TGGTATCAGCAGAAGCCGGGGAAGGCCCCGAAGCTCCTGATCTACGCGGCA |
| | | TCATCACTGCAATCGGGAGTGCCGAGCCGGTTTTCCGGGTCCGGCTCCGGC |
| | | ACCGACTTCACGCTGACCATTTCTTCCCTGCAACCCGAGGACTTCGCCACT |
| | | TACTACTGCCAGCAGTCCTACTCCACCCCTTACTCCTTCGGCCAAGGAACC |
| | | AGGCTGGAAATCAAGACCACTACCCCAGCACCGAGGCCACCCACCCCGGCT |
| | | CCTACCATCGCCTCCCAGCCTCTGTCCCTGCGTCCGGAGGCATGTAGACCC |
| | | GCAGCTGGTGGGGCCGTGCATACCCGGGGTCTTGACTTCGCCTGCGATATC |
| | | TACATTTGGGCCCCTCTGGCTGGTACTTGCGGGGTCCTGCTGCTTTCACTC |
| | | GTGATCACTCTTTACTGTAAGCGCGGTCGGAAGAAGCTGCTGTACATCTTT |
| | | AAGCAACCCTTCATGAGGCCTGTGCAGACTACTCAAGAGGAGGACGGCTGT |
| | | TCATGCCGGTTCCCAGAGGAGGAGGAAGGGGCTGCGAACTGCGCGTGAAA |
| | | TTCAGCCGCAGCGCAGATGCTCCAGCCTACAAGCAGGGGCAGAACCAGCTC |
| | | TACAACGAACTCAATCTTGGTCGGAGAGAGGAGTACGACGTGCTGGACAAG |
| | | CGGAGAGGACGGGACCCAGAAATGGGCGGGAAGCCGCGCAGAAAGAATCCC |
| | | CAAGAGGGCCTGTACAACGAGCTCCAAAAGGATAAGATGGCAGAAGCCTAT |
| | | AGCGAGATTGGTATGAAAGGGGAACGCAGAAGAGGCAAAGGCCACGACGGA |
| | | CTGTACCAGGGACTCAGCACCGCCACCAAGGACACCTATGACGCTCTTCAC |
| | | ATGCAGGCCCTGCCGCCTCGG |

BCMA_EBB-C1979-C12

| | | |
|---|---|---|
| BCMA_EBB- | 8592 | MALPVTALLLPLALLLHAARPEVQLVESGGGLVQPGRSLRLSCTASGFTFD |
| C1979-C12 - | | DYAMHWVRQRPGKGLEWVASINWKGNSLAYGDSVKGRFAISRDNAKNTVFL |
| aa | | QMNSLRTEDTAVYYCASHQGVAYYNYAMDVWGRGTLVTVSSGGGGSGGGGS |
| Full CAR | | GGGGSEIVLTQSPGTLSLSPGERATLSCRATQSIGSSFLAWYQQRPGQAPR |
| | | LLIYGASQRATGIPDRFSGRGSGTDFTLTISRVEPEDSAVYYCQHYESSPS |
| | | WTFGQGTKVEIKTTTPAPRPPTPAPTIASQPLSLRPEACRPAAGGAVHTRG |
| | | LDFACDIYIWAPLAGTCGVLLLSLVITLYCKRGRKKLLYIFKQPFMRPVQT |
| | | TQEEDGCSCRFPEEEEGGCELRVKFSRSADAPAYKQGQNQLYNELNLGRRE |
| | | EYDVLDKRRGRDPEMGGKPRRKNPQEGLYNELQKDKMAEAYSEIGMKGERR |
| | | RGKGHDGLYQGLSTATKDTYDALHMQALPPR |
| BCMA_EBB- | 8614 | ATGGCCCTCCCTGTCACCGCCCTGCTGCTTCCGCTGGCTCTTCTGCTCCAC |
| C1979-C12 - | | GCCGCTCGGCCCGAAGTGCAGCTCGTGGAGAGCGGGGGAGGATTGGTGCAG |
| nt | | CCCGGAAGGTCCCTGCGGCTCTCCTGCACTGCGTCTGGCTTCACCTTCGAC |
| Full CAR | | GACTACGCGATGCACTGGGTCAGACAGCGCCCGGGAAAGGGCCTGGAATGG |
| | | GTCGCCTCAATCAACTGGAAGGGAAACTCCCTGGCCTATGGCGACAGCGTG |
| | | AAGGGCCGCTTCGCCATTTCGCGCGACAACGCCAAGAACACCGTGTTTCTG |
| | | CAAATGAATTCCCTGCGGACCGAGGATACCGCTGTGTACTACTGCGCCAGC |
| | | CACCAGGGCGTGGCATACTATAACTACGCCATGGACGTGTGGGGAAGAGGG |
| | | ACGCTCGTCACCGTGTCCTCCGGGGGCGGTGGATCGGGTGGAGGAGGAAGC |
| | | GGTGGCGGGGGCAGCGAAATCGTGCTGACTCAGAGCCCGGGAACTCTTTCA |
| | | CTGTCCCCGGGAGAACGGGCCACTCTCTCGTGCCGGGCCACCCAGTCCATC |
| | | GGCTCCTCCTTCCTTGCCTGGTACCAGCAGAGGCCAGGACAGGCGCCCCGC |
| | | CTGCTGATCTACGGTGCTTCCCAACGCGCCACTGGCATTCCTGACCGGTTC |
| | | AGCGGCAGAGGGTCGGGAACCGATTTCACACTGACCATTTCCCGGGTGGAG |
| | | CCCGAAGATTCGGCAGTCTACTACTGTCAGCATTACGAGTCCTCCCCTTCA |
| | | TGGACCTTCGGTCAAGGGACCAAAGTGGAGATCAAGACCACTACCCCAGCA |
| | | CCGAGGCCACCCACCCCGGCTCCTACCATCGCCTCCCAGCCTCTGTCCCTG |
| | | CGTCCGGAGGCATGTAGACCCGCAGCTGGTGGGGCCGTGCATACCCGGGGT |
| | | CTTGACTTCGCCTGCGATATCTACATTTGGGCCCCTCTGGCTGGTACTTGC |
| | | GGGGTCCTGCTGCTTTCACTCGTGATCACTCTTTACTGTAAGCGCGGTCGG |
| | | AAGAAGCTGCTGTACATCTTTAAGCAACCCTTCATGAGGCCTGTGCAGACT |
| | | ACTCAAGAGGAGGACGGCTGTTCATGCCGGTTCCCAGAGGAGGAGGAAGGC |
| | | GGCTGCGAACTGCGCGTGAAATTCAGCCGCAGCGCAGATGCTCCAGCCTAC |
| | | AAGCAGGGGCAGAACCAGCTCTACAACGAACTCAATCTTGGTCGGAGAGAG |
| | | GAGTACGACGTGCTGGACAAGCGGAGAGGACGGGACCCAGAAATGGGCGGG |
| | | AAGCCGCGCAGAAAGAATCCCCAAGAGGGCCTGTACAACGAGCTCCAAAAG |
| | | GATAAGATGGCAGAAGCCTATAGCGAGATTGGTATGAAAGGGGAACGCAGA |
| | | AGAGGCAAAGGCCACGACGGACTGTACCAGGGACTCAGCACCGCCACCAAG |
| | | GACACCTATGACGCTCTTCACATGCAGGCCCTGCCGCCTCGG |

BCMA_EBB-C1980-G4

| | | |
|---|---|---|
| BCMA_EBB- | 8593 | MALPVTALLLPLALLLHAARPEVQLVESGGGLVQPGGSLRLSCAASGFTFS |
| C1980-G4- | | SYAMSWVRQAPGKGLEWVSAISGSGGSTYYADSVKGRFTISRDNSKNTLYL |
| aa | | QMNSLRAEDTAVYYCAKVVRDGMDVWGQGTTVTVSSGGGGSGGGGGGGGS |
| Full CAR | | EIVLTQSPATLSLSPGERATLSCRASQSVSSSYLAWYQQKPGQAPRLLIYG |
| | | ASSRATGIPDRFSGNGSGTDFTLTISRLEPEDFAVYYCQQYGSPPRFTFGP |
| | | GTKVDIKTTTPAPRPPTPAPTIASQPLSLRPEACRPAAGGAVHTRGLDFAC |
| | | DIYIWAPLAGTCGVLLLSLVITLYCKRGRKKLLYIFKQPFMRPVQTTQEED |
| | | GCSCRFPEEEEGGCELRVKFSRSADAPAYKQGQNQLYNELNLGRREEYDVL |
| | | DKRRGRDPEMGGKPRRKNPQEGLYNELQKDKMAEAYSEIGMKGERRRGKGH |
| | | DGLYQGLSTATKDTYDALHMQALPPR |
| BCMA_EBB- | 8615 | ATGGCCCTCCCTGTCACCGCCCTGCTGCTTCCGCTGGCTCTTCTGCTCCAC |
| C1980-G4- | | GCCGCTCGGCCCGAGGTGCAGTTGGTCGAAAGCGGGGGCGGGCTTGTGCAG |
| nt | | CCTGGCGGATCACTGCGGCTGTCCTGCGCGGCATCAGGCTTCACGTTTTCT |
| Full CAR | | TCCTACGCCATGTCCTGGGTGCGCCAGGCCCCTGGAAAGGGACTGGAATGG |
| | | GTGTCCGCGATTTCGGGGTCCGGCGGGAGCACCTACTACGCCGATTCCGTG |
| | | AAGGGCCGCTTCACTATCTCGCGGGACAACTCCAAGAACACCCTCTACCTC |
| | | CAAATGAATAGCCTGCGGGCCGAGGATACCGCCGTCTACTATTGCGCTAAG |
| | | GTCGTGCGCGACGGAATGGACGTGTGGGGACAGGGTACCACCGTGACAGTG |
| | | TCCTCGGGGGGAGGCGGTAGCGGCGGAGGAGGAAGCGGTGGTGGAGGTTCC |
| | | GAGATTGTGCTGACTCAATCACCCGCGACCCTGAGCCTGTCCCCCGGCGAA |
| | | AGGGCCACTCTGTCCTGTCGGGCCAGCCAATCAGTCTCCTCCTCGTACCTG |
| | | GCCTGGTACCAGCAGAAGCCAGGACAGGCTCCGAGACTCCTTATCTATGGC |
| | | GCATCCTCCCGCGCCACCGGAATCCCGGATAGGTTCTCGGGAAACGGATCG |
| | | GGGACCGACTTCACTCTCACCATCTCCCGGCTGGAACCGGAGGACTTCGCC |
| | | GTGTACTACTGCCAGCAGTACGGCAGCCCGCCTAGATTCACTTTCGGCCCC |
| | | GGCACCAAAGTGGACATCAAGACCACTACCCCAGCACCGAGGCCACCCACC |
| | | CCGGCTCCTACCATCGCCTCCCAGCCTCTGTCCCTGCGTCCGGAGGCATGT |
| | | AGACCCGCAGCTGGTGGGGCCGTGCATACCCGGGGTCTTGACTTCGCCTGC |
| | | GATATCTACATTTGGGCCCCTCTGGCTGGTACTTGCGGGGTCCTGCTGCTT |
| | | TCACTCGTGATCACTCTTTACTGTAAGCGCGGTCGGAAGAAGCTGCTGTAC |
| | | ATCTTTAAGCAACCCTTCATGAGGCCTGTGCAGACTACTCAAGAGGAGGAC |
| | | GGCTGTTCATGCCGGTTCCCAGAGGAGGAGGAAGGCGGCTGCGAACTGCGC |
| | | GTGAAATTCAGCCGCAGCGCAGATGCTCCAGCCTACAAGCAGGGGCAGAAC |
| | | CAGCTCTACAACGAACTCAATCTTGGTCGGAGAGAGGAGTACGACGTGCTG |
| | | GACAAGCGGAGAGGACGGGACCCAGAAATGGGCGGGAAGCCGCGCAGAAAG |
| | | AATCCCCAAGAGGGCCTGTACAACGAGCTCCAAAAGGATAAGATGGCAGAA |
| | | GCCTATAGCGAGATTGGTATGAAAGGGGAACGCAGAAGAGGCAAAGGCCAC |
| | | GACGGACTGTACCAGGGACTCAGCACCGCCACCAAGGACACCTATGACGCT |
| | | CTTCACATGCAGGCCCTGCCGCCTCGG |

BCMA_EBB-C1980-D2

| | | |
|---|---|---|
| BCMA_EBB- | 8594 | MALPVTALLLPLALLLHAARPEVQLLESGGGLVQPGGSLRLSCAASGFTFS |
| C1980-D2- | | SYAMSWVRQAPGKGLEWVSAISGSGGSTYYADSVKGRFTISRDNSKNTLYL |
| aa | | QMNSLRAEDTAVYYCAKIPQTGTFDYWGQGTLVTVSSGGGGSGGGGSGGGG |
| Full CAR | | SEIVLTQSPGTLSLSPGERATLSCRASQSVSSSYLAWYQQRPGQAPRLLIY |
| | | GASSRATGIPDRFSGSGSGTDFTLTISRLEPEDFAVYYCQHYGSSPSWTFG |
| | | QGTRLEIKTTTPAPRPPTPAPTIASQPLSLRPEACRPAAGGAVHTRGLDFA |
| | | CDIYIWAPLAGTCGVLLLSLVITLYCKRGRKKLLYIFKQPFMRPVQTTQEE |
| | | DGCCRFPEEEEGGCELRVKFSRSADAPAYKQGQNQLYNELNLGRREEYDV |
| | | LDKRRGRDPEMGGKPRRKNPQEGLYNELQKDKMAEAYSEIGMKGERRRGKG |
| | | HDGLYQGLSTATKDTYDALHMQALPPR |
| BCMA_EBB- | 8616 | ATGGCCCTCCCTGTCACCGCCCTGCTGCTTCCGCTGGCTCTTCTGCTCCAC |
| C1980-D2- | | GCCGCTCGGCCCGAAGTGCAGCTGCTGGAGTCCGGCGGTGGATTGGTGCAA |
| nt | | CCGGGGGGATCGCTCAGACTGTCCTGTGCGGCGTCAGGCTTCACCTTCTCG |
| Full CAR | | AGCTACGCCATGTCATGGGTCAGACAGGCCCCTGGAAAGGGTCTGGAATGG |
| | | GTGTCCGCCATTTCCGGGAGCGGGGGATCTACATACTACGCCGATAGCGTG |
| | | AAGGGCCGCTTCACCATTTCCCGGGACAACTCCAAGAACACTCTCTATCTG |
| | | CAAATGAACTCCCTCCGCGCTGAGGACACTGCCGTGTACTACTGCGCCAAA |
| | | ATCCCTCAGACCGGCACCTTCGACTACTGGGGACAGGGGACTCTGGTCACC |
| | | GTCAGCAGCGGTGGCGGAGGTTCGGGGGGAGGAGGAAGCGGCGGCGGAGGG |
| | | TCCGAGATTGTGCTGACCCAGTCACCCGGCACTTTGTCCCTGTCGCCTGGA |
| | | GAAAGGGCCACCCTTTCCTGCCGGGCATCCCAATCCGTGTCCTCCTCGTAC |
| | | CTGGCCTGGTACCAGCAGAGGCCCGGACAGGCCCCACGGCTTCTGATCTAC |
| | | GGAGCAAGCAGCCGCGCGACCGGTATCCCGGACCGGTTTTCGGGCTCGGGC |
| | | TCAGGAACTGACTTCACCCTCACCATCTCCCGCCTGGAACCCGAAGATTTC |
| | | GCTGTGTATTACTGCCAGCACTACGGCAGCTCCCCGTCCTGGACGTTCGGC |
| | | CAGGGAACTCGGCTGGAGATCAAGACCACTACCCCAGCACCGAGGCCACCC |
| | | ACCCCGGCTCCTACCATCGCCTCCCAGCCTCTGTCCCTGCGTCCGGAGGCA |
| | | TGTAGACCCGCAGCTGGTGGGGCCGTGCATACCCGGGGTCTTGACTTCGCC |
| | | TGCGATATCTACATTTGGGCCCCTCTGGCTGGTACTTGCGGGGTCCTGCTG |
| | | CTTTCACTCGTGATCACTCTTTACTGTAAGCGCGGTCGGAAGAAGCTGCTG |
| | | TACATCTTTAAGCAACCCTTCATGAGGCCTGTGCAGACTACTCAAGAGGAG |
| | | GACGGCTGTTCATGCCGGTTCCCAGAGGAGGAGGAAGGCGGCTGCGAACTG |
| | | CGCGTGAAATTCAGCCGCAGCGCAGATGCTCCAGCCTACAAGCAGGGGCAG |
| | | AACCAGCTCTACAACGAACTCAATCTTGGTCGGAGAGAGGAGTACGACGTG |
| | | CTGGACAAGCGGAGAGGACGGGACCCAGAAATGGGCGGGAAGCCGCGCAGA |
| | | AAGAATCCCCAAGAGGGCCTGTACAACGAGCTCCAAAAGGATAAGATGGCA |
| | | GAAGCCTATAGCGAGATTGGTATGAAAGGGGAACGCAGAAGAGGCAAAGGC |
| | | CACGACGGACTGTACCAGGGACTCAGCACCGCCACCAAGGACACCTATGAC |
| | | GCTCTTCACATGCAGGCCCTGCCGCCTCGG |

BCMA_EBB-C1978-A10

| | | |
|---|---|---|
| BCMA_EBB- | 8595 | MALPVTALLLPLALLLHAARPEVQLVETGGGLVQPGGSLRLSCAASGFTFS |
| C1978-A10- | | SYAMSWVRQAPGKGLEWVSAISGSGGSTYYADSVKGRFTMSRENDKNSVFL |
| aa | | QMNSLRVEDTGVYYCARANYKRELRYYYGMDVWGQGTMVTVSSGGGGSGGG |
| Full CAR | | GSGGGGSEIVMTQSPGTLSLSPGESATLSCRASQRVASNYLAWYQHKPGQA |
| | | PSLLISGASSRATGVPDRFSGSGSGTDFTLAISRLEPEDSAVYYCQHYDSS |
| | | PSWTFGQGTKVEIKTTTPAPRPPTPAPTIASQPLSLRPEACRPAAGGAVHT |
| | | RGLDFACDIYIWAPLAGTCGVLLLSLVITLYCKRGRKKLLYIFKQPFMRPV |
| | | QTTQEEDGCSCRFPEEEEGGCELRVKFSRSADAPAYKQGQNQLYNELNLGR |
| | | REEYDVLDKRRGRDPEMGGKPRRKNPQEGLYNELQKDKMAEAYSEIGMKGE |
| | | RRRGKGHDGLYQGLSTATKDTYDALHMQALPPR |
| BCMA_EBB- | 8617 | ATGGCCCTCCCTGTCACCGCCCTGCTGCTTCCGCTGGCTCTTCTGCTCCAC |
| C1978-A10- | | GCCGCTCGGCCCGAAGTGCAACTGGTGGAAACCGGTGGAGGACTCGTGCAG |
| nt | | CCTGGCGGCAGCCTCCGGCTGAGCTGCGCCGCTTCGGGATTCACCTTTTCC |
| Full CAR | | TCCTACGCGATGTCTTGGGTCAGACAGGCCCCCGGAAAGGGGCTGGAATGG |
| | | GTGTCAGCCATCTCCGGCTCCGGCGGATCAACGTACTACGCCGACTCCGTG |
| | | AAAGGCCGGTTCACCATGTCGCGCGAGAATGACAAGAACTCCGTGTTCCTG |
| | | CAAATGAACTCCCTGAGGGTGGAGGACACCGGAGTGTACTATTGTGCGCGC |
| | | GCCAACTACAAGAGAGAGCTGCGGTACTACTACGGAATGGACGTCTGGGGA |
| | | CAGGGAACTATGGTGACCGTGTCATCCGGTGGAGGGGGAAGCGGCGGTGGA |
| | | GGCAGCGGGGGCGGGGGTTCAGAAATTGTCATGACCCAGTCCCCGGGAACT |
| | | CTTTCCCTCTCCCCCGGGGAATCCGCGACTTTGTCCTGCCGGGCCAGCCAG |
| | | CGCGTGGCCTCGAACTACCTCGCATGGTACCAGCATAAGCCAGGCCAAGCC |
| | | CCTTCCCTGCTGATTTCCGGGGCTAGCAGCCGCGCCACTGGCGTGCCGGAT |
| | | AGGTTCTCGGGAAGCGGCTCGGGTACCGATTTCACCCTGGCAATCTCGCGG |
| | | CTGGAACCGGAGGATTCGGCCGTGTACTACTGCCAGCACTATGACTCATCC |
| | | CCCTCCTGGACATTCGGACAGGGCACCAAGGTCGAGATCAAGACCACTACC |
| | | CCAGCACCGAGGCCACCCACCCCGGCTCCTACCATCGCCTCCCAGCCTCTG |
| | | TCCCTGCGTCCGGAGGCATGTAGACCCGCAGCTGGTGGGGCCGTGCATACC |
| | | CGGGGTCTTGACTTCGCCTGCGATATCTACATTTGGGCCCCTCTGGCTGGT |
| | | ACTTGCGGGGTCCTGCTGCTTTCACTCGTGATCACTCTTTACTGTAAGCGC |
| | | GGTCGGAAGAAGCTGCTGTACATCTTTAAGCAACCCTTCATGAGGCCTGTG |
| | | CAGACTACTCAAGAGGAGGACGGCTGTTCATGCCGGTTCCCAGAGGAGGAG |
| | | GAAGGCGGCTGCGAACTGCGCGTGAAATTCAGCCGCAGCGCAGATGCTCCA |
| | | GCCTACAAGCAGGGGCAGAACCAGCTCTACAACGAACTCAATCTTGGTCGG |
| | | AGAGAGGAGTACGACGTGCTGGACAAGCGGAGAGGACGGGACCCAGAAATG |
| | | GGCGGGAAGCCGCGCAGAAAGAATCCCCAAGAGGGCCTGTACAACGAGCTC |
| | | CAAAAGGATAAGATGGCAGAAGCCTATAGCGAGATTGGTATGAAAGGGGAA |
| | | CGCAGAAGAGGCAAAGGCCACGACGGACTGTACCAGGGACTCAGCACCGCC |
| | | ACCAAGGACACCTATGACGCTCTTCACATGCAGGCCCTGCCGCCTCGG |

BCMA_EBB-C1978-D4

| | | |
|---|---|---|
| BCMA_EBB- | 8596 | MALPVTALLLPLALLLHAARPEVQLLETGGGLVQPGGSLRLSCAASGFSFS |
| C1978-D4- | | SYAMSWVRQAPGKGLEWVSAISGSGGSTYYADSVKGRFTISRDNSKNTLYL |
| aa | | QMNSLRAEDTAVYYCAKALVGATGAFDIWGQGTLVTVSSGGGGSGGGGSGG |
| Full CAR | | GGSEIVLTQSPGTLSLSPGERATLSCRASQSLSSNFLAWYQQKPGQAPGLL |
| | | IYGASNWATGTPDRFSGSGSGTDFTLTITRLEPEDFAVYYCQYYGTSPMYT |
| | | FGQGTKVEIKTTTPAPRPPTPAPTIASQPLSLRPEACRPAAGGAVHTRGLD |
| | | FACDIYIWAPLAGTCGVLLLSLVITLYCKRGRKKLLYIFKQPFMRPVQTTQ |
| | | EEDGCSCRFPEEEEGGCELRVKFSRSADAPAYKQGQNQLYNELNLGRREEY |
| | | DVLDKRRGRDPEMGGKPRRKNPQEGLYNELQKDKMAEAYSEIGMKGERRRG |
| | | KGHDGLYQGLSTATKDTYDALHMQALPPR |
| BCMA_EBB- | 8618 | ATGGCCCTCCCTGTCACCGCCCTGCTGCTTCCGCTGGCTCTTCTGCTCCAC |
| C1978-D4- | | GCCGCTCGGCCCGAAGTGCAGCTGCTCGAAACCGGTGGAGGGCTGGTGCAG |
| nt | | CCAGGGGGCTCCCTGAGGCTTTCATGCGCCGCTAGCGGATTCTCCTTCTCC |
| Full CAR | | TCTTACGCCATGTCGTGGGTCCGCCAAGCCCCTGGAAAAGGCCTGGAATGG |
| | | GTGTCCGCGATTTCCGGGAGCGGAGGTTCGACCTATTACGCCGACTCCGTG |
| | | AAGGGCCGCTTTACCATCTCCCGGGATAACTCCAAGAACACTCTGTACCTC |
| | | CAAATGAACTCGCTGAGAGCCGAGGACACCGCCGTGTATTACTGCGCGAAG |
| | | GCGCTGGTCGGCGCGACTGGGGCATTCGACATCTGGGGACAGGGAACTCTT |
| | | GTGACCGTGTCGAGCGGAGGCGGCGGCTCCGGCGGAGGAGGGAGCGGGGGC |
| | | GGTGGTTCCGAAATCGTGTTGACTCAGTCCCCGGGAACCCTGAGCTTGTCA |
| | | CCCGGGGAGCGGGCCACTCTCTCCTGTCGCGCCTCCCAATCGCTCTCATCC |
| | | AATTTCCTGGCCTGGTACCAGCAGAAGCCCGGACAGGCCCCGGGCCTGCTC |
| | | ATCTACGGCGCTTCAAACTGGGCAACGGGAACCCCTGATCGGTTCAGCGGA |
| | | AGCGGATCGGGTACTGACTTTACCCTGACCATCACCAGACTGGAACCGGAG |
| | | GACTTCGCCGTGTACTACTGCCAGTACTACGGCACCTCCCCCATGTACACA |
| | | TTCGGACAGGGTACCAAGGTCGAGATTAAGACCACTACCCCAGCACCGAGG |
| | | CCACCCACCCCGGCTCCTACCATCGCCTCCCAGCCTCTGTCCCTGCGTCCG |
| | | GAGGCATGTAGACCCGCAGCTGGTGGGGCCGTGCATACCCGGGGTCTTGAC |
| | | TTCGCCTGCGATATCTACATTTGGGCCCCTCTGGCTGGTACTTGCGGGGTC |
| | | CTGCTGCTTTCACTCGTGATCACTCTTTACTGTAAGCGCGGTCGGAAGAAG |
| | | CTGCTGTACATCTTTAAGCAACCCTTCATGAGGCCTGTGCAGACTACTCAA |
| | | GAGGAGGACGGCTGTTCATGCCGGTTCCCAGAGGAGGAGGAAGGCGGCTGC |
| | | GAACTGCGCGTGAAATTCAGCCGCAGCGCAGATGCTCCAGCCTACAAGCAG |
| | | GGGCAGAACCAGCTCTACAACGAACTCAATCTTGGTCGGAGAGAGGAGTAC |
| | | GACGTGCTGGACAAGCGGAGAGGACGGGACCCAGAAATGGGCGGGAAGCCG |
| | | CGCAGAAAGAATCCCCAAGAGGGCCTGTACAACGAGCTCCAAAAGGATAAG |
| | | ATGGCAGAAGCCTATAGCGAGATTGGTATGAAAGGGGAACGCAGAAGAGGC |
| | | AAAGGCCACGACGGACTGTACCAGGGACTCAGCACCGCCACCAAGGACACC |
| | | TATGACGCTCTTCACATGCAGGCCCTGCCGCCTCGG |

BCMA_EBB-C1980-A2

| | | |
|---|---|---|
| BCMA_EBB- | 8597 | MALPVTALLLPLALLLHAARPEVQLLESGGGLVQPGGSLRLSCAASGFTFS |
| C1980-A2- | | SYAMSWVRQAPGKGLEWVSAISGSGGSTYYADSVKGRFTISRDNSKNTLYL |
| aa | | QMNSLRAEDTAVYYCVLWFGEGFDPWGQGTLVTVSSGGGGSGGGGSGGGGS |
| Full CAR | | DIVLTQSPLSLPVTPGEPASISCRSSQSLLHSNGYNYLDWYLQKPGQSPQL |
| | | LIYLGSNRASGVPDRFSGSGSGTDFTLKISRVEAEDVGVYYCMQALQTPLT |
| | | FGGGTKVDIKTTTPAPRPPTPAPTIASQPLSLRPEACRPAAGGAVHTRGLD |
| | | FACDIYIWAPLAGTCGVLLLSLVITLYCKRGRKKLLYIFKQPFMRPVQTTQ |
| | | EEDGCSCRFPEEEEGGCELRVKFSRSADAPAYKQGQNQLYNELNLGRREEY |
| | | DVLDKRRGRDPEMGGKPRRKNPQEGLYNELQKDKMAEAYSEIGMKGERRRG |
| | | KGHDGLYQGLSTATKDTYDALHMQALPPR |
| BCMA_EBB- | 8619 | ATGGCCCTCCCTGTCACCGCCCTGCTGCTTCCGCTGGCTCTTCTGCTCCAC |
| C1980-A2- | | GCCGCTCGGCCCGAAGTGCAGCTGCTTGAGAGCGGTGGAGGTCTGGTGCAG |
| nt | | CCCGGGGGATCACTGCGCCTGTCCTGTGCCGCGTCCGGTTTCACTTTCTCC |
| Full CAR | | TCGTACGCCATGTCGTGGGTCAGACAGGCACCGGGAAAGGGACTGGAATGG |
| | | GTGTCAGCCATTTCGGGTTCGGGGGGCAGCACCTACTACGCTGACTCCGTG |
| | | AAGGGCCGGTTCACCATTTCCCGCGACAACTCCAAGAACACCTTGTACCTC |
| | | CAAATGAACTCCCTGCGGGCCGAAGATACCGCCGTGTATTACTGCGTGCTG |
| | | TGGTTCGGAGAGGGATTCGACCCGTGGGGACAAGGAACACTCGTGACTGTG |
| | | TCATCCGGCGGAGGCGGCAGCGGTGGCGGCGGTTCCGGCGGCGGCGGATCT |
| | | GACATCGTGTTGACCCAGTCCCCTCTGAGCCTGCCGGTCACTCCTGGCGAA |
| | | CCAGCCAGCATCTCCTGCCGGTCGAGCCAGTCCCTCCTGCACTCCAATGGG |
| | | TACAACTACCTCGATTGGTATCTGCAAAAGCCGGGCCAGAGCCCCCAGCTG |
| | | CTGATCTACCTTGGGTCAAACCGCGCTTCCGGGGTGCCTGATAGATTCTCC |
| | | GGGTCCGGGAGCGGAACCGACTTTACCCTGAAAATCTCGAGGGTGGAGGCC |
| | | GAGGACGTCGGAGTGTACTACTGCATGCAGGCGCTCCAGACTCCCCTGACC |
| | | TTCGGAGGAGGAACGAAGGTCGACATCAAGACCACTACCCCAGCACCGAGG |
| | | CCACCCACCCCGGCTCCTACCATCGCCTCCCAGCCTCTGTCCCTGCGTCCG |
| | | GAGGCATGTAGACCCGCAGCTGGTGGGGCCGTGCATACCCGGGGTCTTGAC |
| | | TTCGCCTGCGATATCTACATTTGGGCCCCTCTGGCTGGTACTTGCGGGGTC |
| | | CTGCTGCTTTCACTCGTGATCACTCTTTACTGTAAGCGCGGTCGGAAGAAG |
| | | CTGCTGTACATCTTTAAGCAACCCTTCATGAGGCCTGTGCAGACTACTCAA |
| | | GAGGAGGACGGCTGTTCATGCCGGTTCCCAGAGGAGGAGGAAGGCGGCTGC |
| | | GAACTGCGCGTGAAATTCAGCCGCAGCGCAGATGCTCCAGCCTACAAGCAG |
| | | GGGCAGAACCAGCTCTACAACGAACTCAATCTTGGTCGGAGAGAGGAGTAC |
| | | GACGTGCTGGACAAGCGGAGAGGACGGGACCCAGAAATGGGCGGGAAGCCG |
| | | CGCAGAAAGAATCCCCAAGAGGGCCTGTACAACGAGCTCCAAAAGGATAAG |
| | | ATGGCAGAAGCCTATAGCGAGATTGGTATGAAAGGGGAACGCAGAAGAGGC |
| | | AAAGGCCACGACGGACTGTACCAGGGACTCAGCACCGCCACCAAGGACACC |
| | | TATGACGCTCTTCACATGCAGGCCCTGCCGCCTCGG |

BCMA_EBB-C1981-C3

| | | |
|---|---|---|
| BCMA_EBB- | 8598 | MALPVTALLLPLALLLHAARPQVQLVESGGGLVQPGGSLRLSCAASGFTFS |
| C1981-C3- | | SYAMSWVRQAPGKGLEWVSAISGSGGSTYYADSVKGRFTISRDNSKNTLYL |
| aa | | QMNSLRAEDTAVYYCAKVGYDSSGYYRDYYGMDVWGQGTTVTVSSGGGGSG |
| Full CAR | | GGGSGGGGSEIVLTQSPGTLSLSPGERATLSCRASQSVSSSYLAWYQQKPG |
| | | QAPRLLIYGTSSRATGISDRFSGSGSGTDFTLTISRLEPEDFAVYYCQHYG |
| | | NSPPKFTFGPGTKLEIKTTTPAPRPPTPAPTIASQPLSLRPEACRPAAGGA |
| | | VHTRGLDFACDIYIWAPLAGTCGVLLLSLVITLYCKRGRKKLLYIFKQPFM |
| | | RPVQTTQEEDGCSCRFPEEEEGGCELRVKFSRSADAPAYKQGQNQLYNELN |
| | | LGRREEYDVLDKRRGRDPEMGGKPRRKNPQEGLYNELQKDKMAEAYSEIGM |
| | | KGERRRGKGHDGLYQGLSTATKDTYDALHMQALPPR |
| BCMA_EBB- | 8620 | ATGGCCCTCCCTGTCACCGCCCTGCTGCTTCCGCTGGCTCTTCTGCTCCAC |
| C1981-C3- | | GCCGCTCGGCCCCAAGTGCAGCTCGTGGAGTCAGGCGGAGGACTGGTGCAG |
| nt | | CCCGGGGGCTCCCTGAGACTTTCCTGCGCGGCATCGGGTTTTACCTTCTCC |
| Full CAR | | TCCTATGCTATGTCCTGGGTGCGCCAGGCCCCGGGAAAGGGACTGGAATGG |
| | | GTGTCCGCAATCAGCGGTAGCGGGGGCTCAACATACTACGCCGACTCCGTC |
| | | AAGGGTCGCTTCACTATTTCCCGGGACAACTCCAAGAATACCCTGTACCTC |
| | | CAAATGAACAGCCTCAGGGCCGAGGATACTGCCGTGTACTACTGCGCCAAA |
| | | GTCGGATACGATAGCTCCGGTTACTACCGGGACTACTACGGAATGGACGTG |
| | | TGGGGACAGGGCACCACCGTGACCGTGTCAAGCGGCGGAGGCGGTTCAGGA |
| | | GGGGGAGGCTCCGGCGGTGGAGGGTCCGAAATCGTCCTGACTCAGTCGCCT |
| | | GGCACTCTGTCGTTGTCCCCGGGGGAGCGCGCTACCCTGTCGTGTCGGGCG |
| | | TCGCAGTCCGTGTCGAGCTCCTACCTCGCGTGGTACCAGCAGAAGCCCGGA |
| | | CAGGCCCCTAGACTTCTGATCTACGGCACTTCTTCACGCGCCACCGGGATC |
| | | AGCGACAGGTTCAGCGGCTCCGGCTCCGGGACCGACTTCACCCTGACCATT |
| | | AGCCGGCTGGAGCCTGAAGATTTCGCCGTGTATTACTGCCAACACTACGGA |
| | | AACTCGCCGCCAAAGTTCACGTTCGGACCCGGAACCAAGCTGGAAATCAAG |
| | | ACCACTACCCCAGCACCGAGGCCACCCACCCCGGCTCCTACCATCGCCTCC |
| | | CAGCCTCTGTCCCTGCGTCCGGAGGCATGTAGACCCGCAGCTGGTGGGGCC |
| | | GTGCATACCCGGGGTCTTGACTTCGCCTGCGATATCTACATTTGGGCCCCT |
| | | CTGGCTGGTACTTGCGGGGTCCTGCTGCTTTCACTCGTGATCACTCTTTAC |
| | | TGTAAGCGCGGTCGGAAGAAGCTGCTGTACATCTTTAAGCAACCCTTCATG |
| | | AGGCCTGTGCAGACTACTCAAGAGGAGGACGGCTGTTCATGCCGGTTCCCA |
| | | GAGGAGGAGGAAGGCGGCTGCGAACTGCGCGTGAAATTCAGCCGCAGCGCA |
| | | GATGCTCCAGCCTACAAGCAGGGGCAGAACCAGCTCTACAACGAACTCAAT |
| | | CTTGGTCGGAGAGAGGAGTACGACGTGCTGGACAAGCGGAGAGGACGGGAC |
| | | CCAGAAATGGGCGGGAAGCCGCGCAGAAAGAATCCCCAAGAGGGCCTGTAC |
| | | AACGAGCTCCAAAAGGATAAGATGGCAGAAGCCTATAGCGAGATTGGTATG |
| | | AAAGGGGAACGCAGAAGAGGCAAAGGCCACGACGGACTGTACCAGGGACTC |
| | | AGCACCGCCACCAAGGACACCTATGACGCTCTTCACATGCAGGCCCTGCCG |
| | | CCTCGG |

BCMA_EBB-C1978-G4

| | | |
|---|---|---|
| BCMA_EBB- | 8599 | MALPVTALLLPLALLLHAARPEVQLVESGGGLVQPGGSLRLSCAASGFTFS |
| C1978-G4- | | SYAMSWVRQAPGKGLEWVSAISGSGGSTYYADSVKGRFTISRDNSKNTLYL |
| aa | | QMNSLRAEDTAVYYCAKMGWSSGYLGAFDIWGQGTTVTVSSGGGGSGGGGS |
| Full CAR | | GGGGSEIVLTQSPGTLSLSPGERATLSCRASQSVASSFLAWYQQKPGQAPR |
| | | LLIYGASGRATGIPDRFSGSGSGTDFTLTISRLEPEDFAVYYCQHYGGSPR |
| | | LTFGGGTKVDIKTTTPAPRPPTPAPTIASQPLSLRPEACRPAAGGAVHTRG |
| | | LDFACDIYIWAPLAGTCGVLLLSLVITLYCKRGRKKLLYIFKQPFMRPVQT |
| | | TQEEDGCSCRFPEEEEGGCELRVKFSRSADAPAYKQGQNQLYNELNLGRRE |
| | | EYDVLDKRRGRDPEMGGKPRRKNPQEGLYNELQKDKMAEAYSEIGMKGERR |
| | | RGKGHDGLYQGLSTATKDTYDALHMQALPPR |
| BCMA_EBB- | 8621 | ATGGCCCTCCCTGTCACCGCCCTGCTGCTTCCGCTGGCTCTTCTGCTCCAC |
| C1978-G4- | | GCCGCTCGGCCCGAAGTCCAACTGGTGGAGTCCGGGGGAGGGCTCGTGCAG |
| nt | | CCCGGAGGCAGCCTTCGGCTGTCGTGCGCCGCCTCCGGGTTCACGTTCTCA |
| Full CAR | | TCCTACGCGATGTCGTGGGTCAGACAGGCACCAGGAAAGGGACTGGAATGG |
| | | GTGTCCGCCATTAGCGGCTCCGGCGGTAGCACCTACTATGCCGACTCAGTG |
| | | AAGGGAAGGTTCACTATCTCCCGCGACAACAGCAAGAACACCCTGTACCTC |
| | | CAAATGAACTCTCTGCGGGCCGAGGATACCGCGGTGTACTATTGCGCCAAG |
| | | ATGGGTTGGTCCAGCGGATACTTGGGAGCCTTCGACATTTGGGGACAGGGC |
| | | ACTACTGTGACCGTGTCCTCCGGGGGTGGCGGATCGGGAGGCGGCGGCTCG |
| | | GGTGGAGGGGGTTCCGAAATCGTGTTGACCCAGTCACCGGGAACCCTCTCG |
| | | CTGTCCCCGGGAGAACGGGCTACACTGTCATGTAGAGCGTCCCAGTCCGTG |
| | | GCTTCCTCGTTCCTGGCCTGGTACCAGCAGAAGCCGGGACAGGCACCCCGC |
| | | CTGCTCATCTACGGAGCCAGCGGCCGGGCGACCGGCATCCCTGACCGCTTC |
| | | TCCGGTTCCGGCTCGGGCACCGACTTTACTCTGACCATTAGCAGGCTTGAG |
| | | CCCGAGGATTTTGCCGTGTACTACTGCCAACACTACGGGGGGAGCCCTCGC |
| | | CTGACCTTCGGAGGCGGAACTAAGGTCGATATCAAAACCACTACCCCAGCA |
| | | CCGAGGCCACCCACCCCGGCTCCTACCATCGCCTCCCAGCCTCTGTCCCTG |
| | | CGTCCGGAGGCATGTAGACCCGCAGCTGGTGGGGCCGTGCATACCCGGGGT |
| | | CTTGACTTCGCCTGCGATATCTACATTTGGGCCCCTCTGGCTGGTACTTGC |
| | | GGGGTCCTGCTGCTTTCACTCGTGATCACTCTTTACTGTAAGCGCGGTCGG |
| | | AAGAAGCTGCTGTACATCTTTAAGCAACCCTTCATGAGGCCTGTGCAGACT |
| | | ACTCAAGAGGAGGACGGCTGTTCATGCCGGTTCCCAGAGGAGGAGGAAGGC |
| | | GGCTGCGAACTGCGCGTGAAATTCAGCCGCAGCGCAGATGCTCCAGCCTAC |
| | | AAGCAGGGGCAGAACCAGCTCTACAACGAACTCAATCTTGGTCGGAGAGAG |
| | | GAGTACGACGTGCTGGACAAGCGGAGAGGACGGGACCCAGAAATGGGCGGG |
| | | AAGCCGCGCAGAAAGAATCCCCAAGAGGGCCTGTACAACGAGCTCCAAAAG |
| | | GATAAGATGGCAGAAGCCTATAGCGAGATTGGTATGAAAGGGGAACGCAGA |
| | | AGAGGCAAAGGCCACGACGGACTGTACCAGGGACTCAGCACCGCCACCAAG |
| | | GACACCTATGACGCTCTTCACATGCAGGCCCTGCCGCCTCGG |

[0947] In one embodiment, the CAR molecule comprises (e.g., consists of) an amino acid sequence provided in Table 23, or Table 1 of WO2016/014565, or as otherwise described herein. In one embodiment, the CAR molecule comprises (e.g., consists of) an amino acid sequence of SEQ ID NO: 8549, SEQ ID NO: 8550, SEQ ID NO: 8551, SEQ ID NO: 8552, SEQ ID NO: 8553, SEQ ID NO: 8554, SEQ ID NO: 8555, SEQ ID NO: 8556, SEQ ID NO: 8557, SEQ ID NO: 8558, SEQ ID NO: 8559, SEQ ID NO: 8560, SEQ ID NO: 8561, SEQ ID NO: 8562, SEQ ID NO: 8563, SEQ ID NO: 8579, SEQ ID NO: 8580, SEQ ID NO: 8581, SEQ ID NO: 8582, SEQ ID NO: 8583, SEQ ID NO: 8584, SEQ ID NO: 8585, SEQ ID NO: 8586, SEQ ID NO: 8587, SEQ ID NO: 8588, SEQ ID NO: 8589, SEQ ID NO: 8590, SEQ ID NO: 8591, SEQ ID NO: 8592, SEQ ID NO: 8593, SEQ ID NO: 8594, SEQ ID NO: 8595, SEQ ID NO: 8596, SEQ ID NO: 8597, SEQ ID NO: 8598, or SEQ ID NO: 8599; or an amino acid sequence having at least one, two, three, four, five, 10, 15, 20 or 30 modifications (e.g., substitutions, e.g., conservative substitutions) but not more than 60, 50, or 40 modifications (e.g., substitutions, e.g., conservative substitutions) of an amino acid sequence of SEQ ID NO: 8549, SEQ ID NO: 8550, SEQ ID NO: 8551, SEQ ID NO: 8552, SEQ ID NO: 8553, SEQ ID NO: 8554, SEQ ID NO: 8555, SEQ ID NO: 8556, SEQ ID NO: 8557, SEQ ID NO: 8558, SEQ ID NO: 8559, SEQ ID NO: 8560, SEQ ID NO: 8561, SEQ ID NO: 8562, SEQ ID NO: 8563, SEQ ID NO: 8579, SEQ ID NO: 8580, SEQ ID NO: 8581, SEQ ID NO: 8582, SEQ ID NO: 8583, SEQ ID NO: 8584, SEQ ID NO: 8585, SEQ ID NO: 8586, SEQ ID NO: 8587, SEQ ID NO: 8588, SEQ ID NO: 8589, SEQ ID NO: 8590, SEQ ID NO: 8591, SEQ ID NO: 8592, SEQ ID NO: 8593, SEQ ID NO: 8594, SEQ ID NO: 8595, SEQ ID NO: 8596, SEQ ID NO: 8597, SEQ ID NO: 8598, or SEQ ID NO: 8599; or an amino acid sequence having 85%, 90%, 95%, 96%, 97%, 98%, 99% identity to an amino acid sequence of SEQ ID NO: 8549, SEQ ID NO: 8550, SEQ ID NO: 8551, SEQ ID NO: 8552, SEQ ID NO: 8553, SEQ ID NO: 8554, SEQ ID NO: 8555, SEQ ID NO: 8556, SEQ ID NO: 8557, SEQ ID NO: 8558, SEQ ID NO: 8559, SEQ ID NO: 8560, SEQ ID NO: 8561, SEQ ID NO: 8562, SEQ ID NO: 8563, SEQ ID NO: 8579, SEQ ID NO: 8580, SEQ ID NO: 8581, SEQ ID NO: 8582, SEQ ID NO: 8583, SEQ ID NO: 8584, SEQ ID NO: 8585, SEQ ID NO: 8586, SEQ ID NO: 8587, SEQ ID NO: 8588, SEQ ID NO: 8589, SEQ ID NO: 8590, SEQ ID NO: 8591, SEQ ID NO: 8592, SEQ ID NO: 8593, SEQ ID NO: 8594, SEQ ID NO: 8595, SEQ ID NO: 8596, SEQ ID NO: 8597, SEQ ID NO: 8598, or SEQ ID NO: 8599.

### Transmembrane Domains

[0948] With respect to the transmembrane domain, in various embodiments, a CAR can be designed to comprise a transmembrane domain that is attached to the extracellular domain of the CAR. A transmembrane domain can include one or more additional amino acids adjacent to the transmembrane region, e.g., one or more amino acid associated with the extracellular region of the protein from which the transmembrane was derived (e.g., 1, 2, 3, 4, 5, 6, 7, 8, 9, 10 up to 15 amino acids of the extracellular region) and/or one or more additional amino acids associated with the intracellular region of the protein from which the transmembrane protein is derived (e.g., 1, 2, 3, 4, 5, 6, 7, 8, 9, 10 up to 15 amino acids of the intracellular region). In one aspect, the transmembrane domain is one that is associated with one of the other domains of the CAR e.g., in one embodiment, the transmembrane domain may be from the same protein that the signaling domain, costimulatory domain or the hinge domain is derived from. In another aspect, the transmembrane domain is not derived from the same protein that any other domain of the CAR is derived from. In some instances, the transmembrane domain can be selected or modified by amino acid substitution to avoid binding of such domains to the transmembrane domains of the same or different surface membrane proteins, e.g., to minimize interactions with other members of the receptor complex. In one aspect, the transmembrane domain is capable of homodimerization with another CAR on the cell surface of a CAR-expressing cell. In a different aspect, the amino acid sequence of the transmembrane domain may be modified or substituted so as to minimize interactions with the binding domains of the native binding partner present in the same CAR-expressing cell.

[0949] The transmembrane domain may be derived either from a natural or from a recombinant source. Where the source is natural, the domain may be derived from any membrane-bound or transmembrane protein. In one aspect the transmembrane domain is capable of signaling to the intracellular domain(s) whenever the CAR has bound to a target. A transmembrane domain of particular use in this invention may include at least the transmembrane region(s) of e.g., the alpha, beta or zeta chain of the T-cell receptor, CD28, CD27, CD3 epsilon, CD45, CD4, CD5, CD8, CD9, CD16, CD22, CD33, CD37, CD64, CD80, CD86, CD134, CD137, CD154. In some embodiments, a transmembrane domain may include at least the transmembrane region(s) of, e.g., KIRDS2, OX40, CD2, CD27, LFA-1 (CD11a, CD18), ICOS (CD278), 4-1BB (CD137), GITR, CD40, BAFFR, HVEM (LIGHTR), SLAMF7, NKp80 (KLRF1), NKp44, NKp30, NKp46, CD160, CD19, IL2Rbeta, IL2Rgamma, IL7R α, ITGA1, VLA1, CD49a, ITGA4, IA4, CD49D, ITGA6, VLA-6, CD49f, ITGAD, CD11d, ITGAE, CD103, ITGAL, CD11a, LFA-1, ITGAM, CD11b, ITGAX, CD11c, ITGB1, CD29, ITGB2, CD18, LFA-1, ITGB7, TNFR2, DNAM1 (CD226), SLAMF4 (CD244, 2B4), CD84, CD96 (Tactile), CEACAM1, CRTAM, Ly9 (CD229), CD160 (BY55), PSGL1, CD100 (SEMA4D), SLAMF6 (NTB-A, Ly108), SLAM (SLAMF1, CD150, IPO-3), BLAME (SLAMF8), SELPLG (CD162), LTBR, PAG/Cbp, NKG2D, NKG2C.

[0950] In some instances, the transmembrane domain can be attached to the extracellular region of the CAR, e.g., the antigen binding domain of the CAR, via a hinge, e.g., a hinge from a human protein. For example, in one embodiment, the hinge can be a human Ig (immunoglobulin) hinge (e.g., an IgG4 hinge, an IgD hinge), a GS linker (e.g., a GS linker described herein), a KIR2DS2 hinge or a CD8a hinge. In one embodiment, the hinge or spacer comprises (e.g., consists of) the amino acid sequence of SEQ ID NO:6642. In one aspect, the transmembrane domain comprises (e.g., consists of) a transmembrane domain of SEQ ID NO: 6644.

[0951] In certain embodiments, the encoded transmembrane domain comprises an amino acid sequence of a CD8 transmembrane domain having at least one, two or three modifications but not more than 20, 10 or 5 modifications of an amino acid sequence of SEQ ID NO: 6644, or a sequence with 95-99% identity to an amino acid sequence of SEQ ID NO: 6644. In one embodiment, the encoded transmembrane domain comprises the sequence of SEQ ID NO: 6644.

[0952] In other embodiments, the nucleic acid molecule encoding the CAR comprises a nucleotide sequence of a CD8 transmembrane domain, e.g., comprising the sequence of SEQ ID NO: 6645, or a sequence with 95-99% identity thereof.

[0953] In certain embodiments, the encoded antigen binding domain is connected to the transmembrane domain by a hinge region. In one embodiment, the encoded hinge region comprises the amino acid sequence of a CD8 hinge, e.g., SEQ ID NO: 6642; or the amino acid sequence of an IgG4 hinge, e.g., SEQ ID NO: 6630, or a sequence with 95-99% identity to SEQ ID NO: 6642 or 6630. In other embodiments, the nucleic acid sequence encoding the hinge region comprises a sequence of SEQ ID NO: 6643 or SEQ ID NO: 6631, corresponding to a CD8 hinge or an IgG4 hinge, respectively, or a sequence with 95-99% identity to SEQ ID NO:6643 or 6631.

[0954] In one aspect, the hinge or spacer comprises an IgG4 hinge. For example, in one embodiment, the hinge or spacer comprises a hinge of the amino acid sequence

(SEQ ID NO: 6630)
ESKYGPPCPPCPAPEFLGGPSVFLFPPKPKDTLMISRTPEVTCVVVDVSQ
EDPEVQFNWYVDGVEVHNAKTKPREEQFNSTYRVVSVLTVLHQDWLNGKE
YKCKVSNKGLPSSIEKTISKAKGQPREPQVYTLPPSQEEMTKNQVSLTCL
VKGFYPSDIAVEWESNGQPENNYKTTPPVLDSDGSFFLYSRLTVDKSRWQ
EGNVFSCSVMHEALHNHYTQKSLSLSLGKM.

In some embodiments, the hinge or spacer comprises a hinge encoded by a nucleotide sequence of

(SEQ ID NO: 6631)
GAGAGCAAGTACGGCCCTCCCTGCCCCCCTTGCCCTGCCCCCGAGTTCCT
GGGCGGACCCAGCGTGTTCCTGTTCCCCCCCAAGCCCAAGGACACCCTGA
TGATCAGCCGGACCCCCGAGGTGACCTGTGTGGTGGTGGACGTGTCCCAG
GAGGACCCCGAGGTCCAGTTCAACTGGTACGTGGACGGCGTGGAGGTGCA
CAACGCCAAGACCAAGCCCCGGGAGGAGCAGTTCAATAGCACCTACCGGG
TGGTGTCCGTGCTGACCGTGCTGCACCAGGACTGGCTGAACGGCAAGGAA
TACAAGTGTAAGGTGTCCAACAAGGGCCTGCCCAGCAGCATCGAGAAAAC
CATCAGCAAGGCCAAGGGCCAGCCTCGGGAGCCCCAGGTGTACACCCTGC
CCCCTAGCCAAGAGGAGATGACCAAGAACCAGGTGTCCCTGACCTGCCTG
GTGAAGGGCTTCTACCCCAGCGACATCGCCGTGGAGTGGGAGAGCAACGG
CCAGCCCGAGAACAACTACAAGACCACCCCCCCTGTGCTGGACAGCGACG
GCAGCTTCTTCCTGTACAGCCGGCTGACCGTGGACAAGAGCCGGTGGCAG
GAGGGCAACGTCTTTAGCTGCTCCGTGATGCACGAGGCCCTGCACAACCA
CTACACCCAGAAGAGCCTGAGCCTGTCCCTGGGCAAGATG.

[0955] In one aspect, the hinge or spacer comprises an IgD hinge. For example, in one embodiment, the hinge or spacer comprises a hinge of the amino acid sequence RWPESPKAQASSVPTAQPQAEGSLAKATTAPATTRNTGRGGEEKKKEKEKEEQEERETKTPECP SHTQPLGVYLLTPAVQDLWLRDKATFTCFVVGSDLKDAHLTWEVAGKVPTGGVEEGLLERHSN GSQSQHSRLTLPRSLWNAGTSVTCTLNHPSLPPQRLMALREPAAQAPVKLSLNLLASSDPPEAAS WLLCEVSGFSPPNILLMWLEDQREVNTSGFAPARPPPQPGSTTFWAWSVLRVPAPPSPQPATYTC VVSHEDSRTLLNASRSLEVSYVTDH (SEQ ID NO:6632). In some embodiments, the hinge or spacer comprises a hinge encoded by a nucleotide sequence of

(SEQ ID NO: 6633)
AGGTGGCCCGAAAGTCCCAAGGCCCAGGCATCTAGTGTTCCTACTGCACA
GCCCCAGGCAGAAGGCAGCCTAGCCAAAGCTACTACTGCACCTGCCACTA
CGCGCAATACTGGCCGTGGCGGGGAGGAGAAGAAAAAGGAGAAAGAGAAA
GAAGAACAGGAAGAGAGGGAGACCAAGACCCCTGAATGTCCATCCCATAC
CCAGCCGCTGGGCGTCTATCTCTTGACTCCCGCAGTACAGGACTTGTGGC
TTAGAGATAAGGCCACCTTTACATGTTTCGTCGTGGGCTCTGACCTGAAG
GATGCCCATTTGACTTGGGAGGTTGCCGGAAAGGTACCCACAGGGGGGGT
TGAGGAAGGGTTGCTGGAGCGCCATTCCAATGGCTCTCAGAGCCAGCACT
CAAGACTCACCCTTCCGAGATCCCTGTGGAACGCCGGGACCTCTGTCACA
TGTACTCTAAATCATCCTAGCCTGCCCCCACAGCGTCTGATGGCCCTTAG
AGAGCCAGCCGCCCAGGCACCAGTTAAGCTTAGCCTGAATCTGCTCGCCA
GTAGTGATCCCCCAGAGGCCGCCAGCTGGCTCTTATGCGAAGTGTCCGGC
TTTAGCCCGCCCAACATCTTGCTCATGTGGCTGGAGGACCAGCGAGAAGT
GAACACCAGCGGCTTCGCTCCAGCCCGGCCCCCACCCCAGCCGGGTTCTA
CCACATTCTGGGCCTGGAGTGTCTTAAGGGTCCCAGCACCACCTAGCCCC
CAGCCAGCCACATACACCTGTGTTGTGTCCCATGAAGATAGCAGGACCCT
GCTAAATGCTTCTAGGAGTCTGGAGGTTTCCTACGTGACTGACCATT.

[0956] In one aspect, the transmembrane domain may be recombinant, in which case it will comprise predominantly hydrophobic residues such as leucine and valine. In one aspect a triplet of phenylalanine, tryptophan and valine can be found at each end of a recombinant transmembrane domain.

[0957] Optionally, a short oligo- or polypeptide linker, between 2 and 10 amino acids in length may form the linkage between the transmembrane domain and the cytoplasmic region of the CAR. A glycine-serine doublet provides a particularly suitable linker. For example, in one aspect, the linker comprises the amino acid sequence of GGGGSGGGGS (SEQ ID NO:6634). In some embodiments, the linker is encoded by a nucleotide sequence of GGTGGCGGAGGTTCTGGAGGTGGAGGTTCC (SEQ ID NO:6635).

[0958] In one aspect, the hinge or spacer comprises a KIR2DS2 hinge.

### Signaling Domains

[0959] In embodiments of the invention having an intracellular signaling domain, such a domain can contain, e.g., one or more of a primary signaling domain and/or a costimulatory signaling domain. In some embodiments, the intracellular signaling domain comprises a sequence encoding a primary signaling domain. In some embodiments, the intracellular signaling domain comprises a costimulatory signaling domain. In some embodiments, the intracellular signaling domain comprises a primary signaling domain and a costimulatory signaling domain.

[0960] The intracellular signaling sequences within the cytoplasmic portion of the CAR of the invention may be linked to each other in a random or specified order. Optionally, a short oligo- or polypeptide linker, for example, between 2 and 10 amino acids (e.g., 2, 3, 4, 5, 6, 7, 8, 9, or 10 amino acids) in length may form the linkage between intracellular signaling sequences. In one embodiment, a glycine-serine doublet can be used as a suitable linker. In one embodiment, a single amino acid, e.g., an alanine, a glycine, can be used as a suitable linker.

[0961] In one aspect, the intracellular signaling domain is designed to comprise two or more, e.g., 2, 3, 4, 5, or more, costimulatory signaling domains. In an embodiment, the two or more, e.g., 2, 3, 4, 5, or more, costimulatory signaling domains, are separated by a linker molecule, e.g., a linker molecule described herein. In one embodiment, the intracellular signaling domain comprises two costimulatory signaling domains. In some embodiments, the linker molecule is a glycine residue. In some embodiments, the linker is an alanine residue.

### Primary Signaling Domains

[0962] A primary signaling domain regulates primary activation of the TCR complex either in a stimulatory way, or in an inhibitory way. Primary intracellular signaling domains that act in a stimulatory manner may contain signaling motifs which are known as immunoreceptor tyrosine-based activation motifs or ITAMs. Examples of ITAM containing primary intracellular signaling domains that are of particular use in the invention include those of CD3 zeta, common FcR gamma (FCER1G), Fc gamma RIIa, FcR beta (Fc Epsilon R1b), CD3 gamma, CD3 delta, CD3 epsilon, CD79a, CD79b, DAP10, and DAP12. In one embodiment, a CAR of the invention comprises an intracellular signaling domain, e.g., a primary signaling domain of CD3-zeta.

[0963] In one embodiment, the encoded primary signaling domain comprises a functional signaling domain of CD3 zeta. The encoded CD3 zeta primary signaling domain can comprise an amino acid sequence having at least one, two or three modifications but not more than 20, 10 or 5 modifications of an amino acid sequence of SEQ ID NO: 6648 or SEQ ID NO: 6650, or a sequence with 95-99% identity to an amino acid sequence of SEQ ID NO: 6648 or SEQ ID NO: 6650. In some embodiments, the encoded primary signaling domain comprises a sequence of SEQ ID NO: 6648 or SEQ ID NO: 6650. In other embodiments, the nucleic acid sequence encoding the primary signaling domain comprises a sequence of SEQ ID NO: 6649 or SEQ ID NO: 6651, or a sequence with 95-99% identity thereof.

### Costimulatory Signaling Domains

[0964] In some embodiments, the encoded intracellular signaling domain comprises a costimulatory signaling domain. For example, the intracellular signaling domain can comprise a primary signaling domain and a costimulatory signaling domain. In some embodiments, the encoded costimulatory signaling domain comprises a functional signaling domain of a protein chosen from one or more of CD27, CD28, 4-1BB (CD137), OX40, CD30, CD40, PD-1, ICOS, lymphocyte function-associated antigen-1 (LFA-1), CD2, CD7, LIGHT, NKG2C, B7-H3, a ligand that specifically binds with CD83, CDS, ICAM-1, GITR, BAFFR, HVEM (LIGHTR), SLAMF7, NKp80 (KLRF1), CD160, CD19, CD4, CD8alpha, CD8beta, IL2R beta, IL2R gamma, IL7R alpha, ITGA4, VLA1, CD49a, ITGA4, IA4, CD49D, ITGA6, VLA-6, CD49f, ITGAD, CD11d, ITGAE, CD103, ITGAL, CD11a, LFA-1, ITGAM, CD11b, ITGAX, CD11c, ITGB1, CD29, ITGB2, CD18, LFA-1, ITGB7, TNFR2, TRANCE/RANKL, DNAM1 (CD226), SLAMF4 (CD244, 2B4), CD84, CD96 (Tactile), CEACAM1, CRTAM, Ly9 (CD229), CD160 (BY55), PSGL1, CD100 (SEMA4D), CD69, SLAMF6 (NTB-A, Ly108), SLAM (SLAMF1, CD150, IPO-3), BLAME (SLAMF8), SELPLG (CD162), LTBR, LAT, GADS, SLP-76, PAG/Cbp, NKp44, NKp30, NKp46, or NKG2D.

[0965] In certain embodiments, the encoded costimulatory signaling domain comprises an amino acid sequence having at least one, two or three modifications but not more than 20, 10 or 5 modifications of an amino acid sequence of SEQ ID NO: 6646 or SEQ ID NO: 6636, or a sequence with 95-99% identity to an amino acid sequence of SEQ ID NO: 6646 or SEQ ID NO: 6636. In one embodiment, the encoded costimulatory signaling domain comprises a sequence of SEQ ID NO: 6646 or SEQ ID NO: 6636. In other embodiments, the nucleic acid sequence encoding the costimulatory signaling domain comprises a sequence of SEQ ID NO: 6647 or SEQ ID NO: 6637, or a sequence with 95-99% identity thereof.

[0966] In other embodiments, the encoded intracellular domain comprises the sequence of SEQ ID NO: 6646 or SEQ ID NO: 6636, and the sequence of SEQ ID NO: 6648 or SEQ ID NO: 6650, wherein the sequences comprising the intracellular signaling domain are expressed in the same frame and as a single polypeptide chain.

[0967] In certain embodiments, the nucleic acid sequence encoding the intracellular signaling domain comprises a sequence of SEQ ID NO: 6647 or SEQ ID NO: 6637, or a sequence with 95-99% identity thereof, and a sequence of SEQ ID NO: 6649 or SEQ ID NO: 6651, or a sequence with 95-99% identity thereof.

[0968] In some embodiments, the nucleic acid molecule further encodes a leader sequence. In one embodiment, the leader sequence comprises the sequence of SEQ ID NO: 6640.

[0969] In one aspect, the intracellular signaling domain is designed to comprise the signaling domain of CD3-zeta and the signaling domain of CD28. In one aspect, the intracellular signaling domain is designed to comprise the signaling domain of CD3-zeta and the signaling domain of 4-1BB. In one aspect, the signaling domain of 4-1BB is a signaling domain of SEQ ID NO: 6646. In one aspect, the signaling domain of CD3-zeta is a signaling domain of SEQ ID NO: 6648.

[0970] In one aspect, the intracellular signaling domain is designed to comprise the signaling domain of CD3-zeta and the signaling domain of CD27. In one aspect, the signaling domain of CD27 comprises an amino acid sequence of QRRKYRSNKGESPVEPAEPCRYSCPREEEGSTIPIQEDYRKPEPACSP (SEQ ID NO: 6636). In one aspect, the signalling domain of CD27 is encoded by a nucleic acid sequence of

(SEQ ID NO: 6637)
AGGAGTAAGAGGAGCAGGCTCCTGCACAGTGACTACATGAACATGACTCC
CCGCCGCCCCGGGCCCACCCGCAAGCATTACCAGCCCTATGCCCCACCAC
GCGACTTCGCAGCCTATCGCTCC.

### Vectors

[0971] In another aspect, the invention pertains to a vector comprising a nucleic acid sequence encoding a CAR described herein. In one embodiment, the vector is chosen from a DNA vector, an RNA vector, a plasmid, a lentivirus vector, adenoviral vector, or a retrovirus vector. In one embodiment, the vector is a lentivirus vector. These vectors or portions thereof may, among other things, be used to create template nucleic acids, as described herein for use with the CRISPR systems as described herein. Alternatively, the vectors may be used to deliver nucleic acid directly to the cell, e.g., the immune effector cell, e.g., the T cell, e.g., the allogeneic T cell, independent of the CRISPR system.

[0972] The present invention also provides vectors in which a DNA of the present invention is inserted. Vectors derived from retroviruses such as the lentivirus are suitable tools to achieve long-term gene transfer since they allow long-term, stable integration of a transgene and its propagation in daughter cells. Lentiviral vectors have the added advantage over vectors derived from onco-retroviruses such as murine leukemia viruses in that they can transduce non-proliferating cells, such as hepatocytes. They also have the added advantage of low immunogenicity. A retroviral vector may also be, e.g., a gammaretroviral vector. A gammaretroviral vector may include, e.g., a promoter, a packaging signal (ψ), a primer binding site (PBS), one or more (e.g., two) long terminal repeats (LTR), and a transgene of interest, e.g., a gene encoding a CAR. A gammaretroviral vector may lack viral structural gens such as gag, pol, and env. Exemplary gammaretroviral vectors include Murine Leukemia Virus (MLV), Spleen-Focus Forming Virus (SFFV), and Myeloproliferative Sarcoma Virus (MPSV), and vectors derived therefrom. Other gammaretroviral vectors are described, e.g., in Tobias Maetzig et al., “Gammaretroviral Vectors: Biology, Technology and Application” Viruses. 2011 June; 3(6): 677-713.

[0973] In another embodiment, the vector comprising the nucleic acid encoding the desired CAR of the invention is an adenoviral vector (A5/35). In another embodiment, the expression of nucleic acids encoding CARs can be accomplished using of transposons such as sleeping beauty, crisper, CAS9, and zinc finger nucleases. See below June et al. 2009Nature Reviews Immunology 9.10: 704-716, is incorporated herein by reference.

[0974] The nucleic acid can be cloned into a number of types of vectors. For example, the nucleic acid can be cloned into a vector including, but not limited to a plasmid, a phagemid, a phage derivative, an animal virus, and a cosmid. Vectors of particular interest include expression vectors, replication vectors, probe generation vectors, and sequencing vectors.

[0975] Disclosed herein are methods for producing an in vitro transcribed RNA CAR. The present invention also includes a CAR encoding RNA construct that can be directly transfected into a cell. A method for generating mRNA for use in transfection can involve in vitro transcription (IVT) of a template with specially designed primers, followed by polyA addition, to produce a construct containing 3′ and 5′ untranslated sequence (“UTR”), a 5′ cap and/or Internal Ribosome Entry Site (IRES), the nucleic acid to be expressed, and a polyA tail, typically 50-2000 bases in length (SEQ ID NO: 6638). RNA so produced can efficiently transfect different kinds of cells. In one aspect, the template includes sequences for the CAR.

### Non-Viral Delivery Methods

[0976] In some aspects, non-viral methods can be used to deliver a nucleic acid encoding a CAR described herein into a cell or tissue or a subject.

[0977] In some embodiments, the non-viral method includes the use of a transposon (also called a transposable element). In some embodiments, a transposon is a piece of DNA that can insert itself at a location in a genome, for example, a piece of DNA that is capable of self-replicating and inserting its copy into a genome, or a piece of DNA that can be spliced out of a longer nucleic acid and inserted into another place in a genome. For example, a transposon comprises a DNA sequence made up of inverted repeats flanking genes for transposition.

[0978] In some embodiments, cells, e.g., T or NK cells, are generated that express a CAR described herein by using a combination of gene insertion using the SBTS and genetic editing using a nuclease (e.g., Zinc finger nucleases (ZFNs), Transcription Activator-Like Effector Nucleases (TALENs), the CRISPR/Cas system, or engineered meganuclease re-engineered homing endonucleases).

[0979] In some embodiments, cells of the invention, e.g., T or NK cells, e.g., allogeneic T cells, e.g., described herein, (e.g., that express a CAR described herein) are generated by contacting the cells with (a) a composition comprising one or more gRNA molecules, e.g., as described herein, and one or more Cas molecules, e.g., a Cas9 molecule, e.g., as described herein, and (b) nucleic acid comprising sequence encoding a CAR, e.g., described herein (such as a template nucleic acid molecule as described herein).

[0980] Without being bound by theory, said composition of (a), above, will induce a break at or near the genomic DNA targeted by the targeting domain of the gRNA molecule(s), and the nucleic acid of (b) will incorporate, e.g., partially or wholly, into the genome at or near said break, such that upon integration, the encoded CAR molecule is expressed. In embodiments, expression of the CAR will be controlled by promoters or other regulatory elements endogenous to the genome (e.g., the promoter controlling expression from the gene in which the nucleic acid of (b) was inserted). In other embodiments, the nucleic acid of (b) further comprises a promoter and/or other regulatory elements, e.g., as described herein, e.g., an EF1-alpha promoter, operably linked to the sequence encoding the CAR, such that upon integration, expression of the CAR is controlled by that promoter and/or other regulatory elements. Additional features of the invention relating to use of CRISPR/Cas9 systems, e.g., as described herein, to direct incorporation of nucleic acid sequence encoding a CAR, e.g., as described herein, are described elsewhere in this application, e.g., in the section relating to gene insertion and homologous recombination. In embodiments, the composition of a) above is a composition comprising RNPs comprising the one or more gRNA molecules. In embodiments, RNPs comprising gRNAs targeting unique target sequences are introduced into the cell simultaneously, e.g., as a mixture of RNPs comprising the one or more gRNAs. In embodiments, RNPs comprising gRNAs targeting unique target sequences are introduced into the cell sequentially.

[0981] In some embodiments, use of a non-viral method of delivery permits reprogramming of cells, e.g., T or NK cells, and direct infusion of the cells into a subject. Advantages of non-viral vectors include but are not limited to the ease and relatively low cost of producing sufficient amounts required to meet a patient population, stability during storage, and lack of immunogenicity.

### Inhibitory Domains

[0982] In an embodiment, the vector comprises a nucleic acid sequence that encodes a CAR, e.g., a CAR described herein, and a nucleic acid sequence that encodes an inhibitory molecule comprising: an inhKIR cytoplasmic domain; a transmembrane domain, e.g., a KIR transmembrane domain; and an inhibitor cytoplasmic domain, e.g., an ITIM domain, e.g., an inhKIR ITIM domain. In an embodiment the inhibitory molecule is a naturally occurring inhKIR, or a sequence sharing at least 50, 60, 70, 80, 85, 90, 95, or 99% homology with, or that differs by no more than 1, 2, 3, 4, 5, 6, 7, 8, 9, 10, 15, or 20 residues from, a naturally occurring inhKIR.

[0983] In an embodiment, the nucleic acid sequence that encodes an inhibitory molecule comprises: a SLAM family cytoplasmic domain; a transmembrane domain, e.g., a SLAM family transmembrane domain; and an inhibitor cytoplasmic domain, e.g., a SLAM family domain, e.g., an SLAM family ITIM domain. In an embodiment the inhibitory molecule is a naturally occurring SLAM family member, or a sequence sharing at least 50, 60, 70, 80, 85, 90, 95, or 99% homology with, or that differs by no more than 1, 2, 3, 4, 5, 6, 7, 8, 9, 10, 15, or 20 residues from, a naturally occurring SLAM family member.

[0984] In one embodiment, the vector is an in vitro transcribed vector, e.g., a vector that transcribes RNA of a nucleic acid molecule described herein. In one embodiment, the nucleic acid sequence in the vector further comprises a poly(A) tail, e.g., a poly A tail. In one embodiment, the nucleic acid sequence in the vector further comprises a 3′UTR, e.g., a 3′ UTR described herein, e.g., comprising at least one repeat of a 3′UTR derived from human beta-globulin. In one embodiment, the nucleic acid sequence in the vector further comprises promoter, e.g., a T2A promoter.

### Promoters

[0985] In one embodiment, the vector further comprises a promoter. In some embodiments, the promoter is chosen from an EF-1 promoter, a CMV IE gene promoter, an EF-1α promoter, an ubiquitin C promoter, or a phosphoglycerate kinase (PGK) promoter. In one embodiment, the promoter is an EF-1 promoter. In one embodiment, the EF-1 promoter comprises a sequence of SEQ ID NO: 6639.

### Host Cells for CAR Expression

[0986] As noted above, in some aspects the invention pertains to a cell, e.g., an immune effector cell, (e.g., a population of cells, e.g., a population of immune effector cells) comprising a nucleic acid molecule, a CAR polypeptide molecule, or a vector as described herein.

[0987] In certain aspects of the present disclosure, immune effector cells, e.g., T cells, can be obtained from a unit of blood collected from a subject using any number of techniques known to the skilled artisan, such as Ficoll™ separation. In one preferred aspect, cells from the circulating blood of an individual are obtained by apheresis. The apheresis product typically contains lymphocytes, including T cells, monocytes, granulocytes, B cells, other nucleated white blood cells, red blood cells, and platelets. In one aspect, the cells collected by apheresis may be washed to remove the plasma fraction and, optionally, to place the cells in an appropriate buffer or media for subsequent processing steps. In one embodiment, the cells are washed with phosphate buffered saline (PBS). In an alternative embodiment, the wash solution lacks calcium and may lack magnesium or may lack many if not all divalent cations.

[0988] Initial activation steps in the absence of calcium can lead to magnified activation. As those of ordinary skill in the art would readily appreciate a washing step may be accomplished by methods known to those in the art, such as by using a semi-automated “flow-through” centrifuge (for example, the Cobe 2991 cell processor, the Baxter CytoMate, or the Haemonetics Cell Saver 5) according to the manufacturer's instructions. After washing, the cells may be resuspended in a variety of biocompatible buffers, such as, for example, Ca-free, Mg-free PBS, PlasmaLyte A, or other saline solution with or without buffer.

[0989] Alternatively, the undesirable components of the apheresis sample may be removed and the cells directly resuspended in culture media.

[0990] It is recognized that the methods of the application can utilize culture media conditions comprising 5% or less, for example 2%, human AB serum, and employ known culture media conditions and compositions, for example those described in Smith et al., “Ex vivo expansion of human T cells for adoptive immunotherapy using the novel Xeno-free CTS Immune Cell Serum Replacement” Clinical & Translational Immunology (2015) 4, e31; doi:10.1038/cti.2014.31.

[0991] In one aspect, T cells are isolated from peripheral blood lymphocytes by lysing the red blood cells and depleting the monocytes, for example, by centrifugation through a PERCOLL™ gradient or by counterflow centrifugal elutriation.

[0992] The methods described herein can include, e.g., selection of a specific subpopulation of immune effector cells, e.g., T cells, that are a T regulatory cell-depleted population, CD25+ depleted cells, using, e.g., a negative selection technique, e.g., described herein. Preferably, the population of T regulatory depleted cells contains less than 30%, 25%, 20%, 15%, 10%, 5%, 4%, 3%, 2%, 1% of CD25+ cells.

[0993] In one embodiment, T regulatory cells, e.g., CD25+ T cells, are removed from the population using an anti-CD25 antibody, or fragment thereof, or a CD25-binding ligand, IL-2. In one embodiment, the anti-CD25 antibody, or fragment thereof, or CD25-binding ligand is conjugated to a substrate, e.g., a bead, or is otherwise coated on a substrate, e.g., a bead. In one embodiment, the anti-CD25 antibody, or fragment thereof, is conjugated to a substrate as described herein.

[0994] In one embodiment, the T regulatory cells, e.g., CD25+ T cells, are removed from the population using CD25 depletion reagent from Miltenyi™. In one embodiment, the ratio of cells to CD25 depletion reagent is 1 e7 cells to 20 uL, or 1 e7 cells to 15 uL, or 1 e7 cells to 10 uL, or 1 e7 cells to 5 uL, or 1 e7 cells to 2.5 uL, or 1 e7 cells to 1.25 uL. In one embodiment, e.g., for T regulatory cells, e.g., CD25+ depletion, greater than 500 million cells/ml is used. In a further aspect, a concentration of cells of 600, 700, 800, or 900 million cells/ml is used.

[0995] In one embodiment, the population of immune effector cells to be depleted includes about 6×10⁹ CD25+ T cells. In other aspects, the population of immune effector cells to be depleted include about 1×10⁹ to 1×10¹⁰ CD25+ T cell, and any integer value in between. In one embodiment, the resulting population T regulatory depleted cells has 2×10⁹ T regulatory cells, e.g., CD25+ cells, or less (e.g., 1×10⁹, 5×10⁸, 1×10⁸, 5×10⁷, 1×10⁷, or less CD25+ cells).

[0996] In one embodiment, the T regulatory cells, e.g., CD25+ cells, are removed from the population using the CliniMAC system with a depletion tubing set, such as, e.g., tubing 162-01. In one embodiment, the CliniMAC system is run on a depletion setting such as, e.g., DEPLETION2.1.

[0997] Without wishing to be bound by a particular theory, decreasing the level of negative regulators of immune cells (e.g., decreasing the number of unwanted immune cells, e.g., T_{REG} cells), in a subject prior to apheresis or during manufacturing of a CAR-expressing cell product can reduce the risk of subject relapse. For example, methods of depleting T_{REG} cells are known in the art. Methods of decreasing T_{REG} cells include, but are not limited to, cyclophosphamide, anti-GITR antibody (an anti-GITR antibody described herein), CD25-depletion, and combinations thereof.

[0998] In some embodiments, the manufacturing methods comprise reducing the number of (e.g., depleting) T_{REG} cells prior to manufacturing of the CAR-expressing cell. For example, manufacturing methods comprise contacting the sample, e.g., the apheresis sample, with an anti-GITR antibody and/or an anti-CD25 antibody (or fragment thereof, or a CD25-binding ligand), e.g., to deplete T_{REG} cells prior to manufacturing of the CAR-expressing cell (e.g., T cell, NK cell) product.

[0999] In an embodiment, a subject is pre-treated with one or more therapies that reduce T_{REG} cells prior to collection of cells for CAR-expressing cell product manufacturing, thereby reducing the risk of subject relapse to CAR-expressing cell treatment. In an embodiment, methods of decreasing T_{REG} cells include, but are not limited to, administration to the subject of one or more of cyclophosphamide, anti-GITR antibody, CD25-depletion, or a combination thereof. Administration of one or more of cyclophosphamide, anti-GITR antibody, CD25-depletion, or a combination thereof, can occur before, during or after an infusion of the CAR-expressing cell product.

[1000] In an embodiment, a subject is pre-treated with cyclophosphamide prior to collection of cells for CAR-expressing cell product manufacturing, thereby reducing the risk of subject relapse to CAR-expressing cell treatment. In an embodiment, a subject is pre-treated with an anti-GITR antibody prior to collection of cells for CAR-expressing cell product manufacturing, thereby reducing the risk of subject relapse to CAR-expressing cell treatment.

[1001] In one embodiment, the population of cells to be removed are neither the regulatory T cells or tumor cells, but cells that otherwise negatively affect the expansion and/or function of CART cells, e.g. cells expressing CD14, CD11b, CD33, CD15, or other markers expressed by potentially immune suppressive cells. In one embodiment, such cells are envisioned to be removed concurrently with regulatory T cells and/or tumor cells, or following said depletion, or in another order.

[1002] The methods described herein can include more than one selection step, e.g., more than one depletion step. Enrichment of a T cell population by negative selection can be accomplished, e.g., with a combination of antibodies directed to surface markers unique to the negatively selected cells. One method is cell sorting and/or selection via negative magnetic immunoadherence or flow cytometry that uses a cocktail of monoclonal antibodies directed to cell surface markers present on the cells negatively selected. For example, to enrich for CD4+ cells by negative selection, a monoclonal antibody cocktail can include antibodies to CD14, CD20, CD11b, CD16, HLA-DR, and CD8.

[1003] The methods described herein can further include removing cells from the population which express a tumor antigen, e.g., a tumor antigen that does not comprise CD25, e.g., CD19, CD30, CD38, CD123, CD20, CD14 or CD11b, to thereby provide a population of T regulatory depleted, e.g., CD25+ depleted, and tumor antigen depleted cells that are suitable for expression of a CAR, e.g., a CAR described herein. In one embodiment, tumor antigen expressing cells are removed simultaneously with the T regulatory, e.g., CD25+ cells. For example, an anti-CD25 antibody, or fragment thereof, and an anti-tumor antigen antibody, or fragment thereof, can be attached to the same substrate, e.g., bead, which can be used to remove the cells or an anti-CD25 antibody, or fragment thereof, or the anti-tumor antigen antibody, or fragment thereof, can be attached to separate beads, a mixture of which can be used to remove the cells. In other embodiments, the removal of T regulatory cells, e.g., CD25+ cells, and the removal of the tumor antigen expressing cells is sequential, and can occur, e.g., in either order.

[1004] Also provided are methods that include removing cells from the population which express a check point inhibitor, e.g., a check point inhibitor described herein, e.g., one or more of PD1+ cells, LAG3+ cells, and TIM3+ cells, to thereby provide a population of T regulatory depleted, e.g., CD25+ depleted cells, and check point inhibitor depleted cells, e.g., PD1+, LAG3+ and/or TIM3+ depleted cells. Exemplary check point inhibitors include B7-H1, B7-1, CD160, P1H, 2B4, PD1, TIM3, CEACAM (e.g., CEACAM-1, CEACAM-3 and/or CEACAM-5), LAG3, TIGIT, CTLA-4, BTLA and LAIR1. In one embodiment, check point inhibitor expressing cells are removed simultaneously with the T regulatory, e.g., CD25+ cells. For example, an anti-CD25 antibody, or fragment thereof, and an anti-check point inhibitor antibody, or fragment thereof, can be attached to the same bead which can be used to remove the cells, or an anti-CD25 antibody, or fragment thereof, and the anti-check point inhibitor antibody, or fragment there, can be attached to separate beads, a mixture of which can be used to remove the cells. In other embodiments, the removal of T regulatory cells, e.g., CD25+ cells, and the removal of the check point inhibitor expressing cells is sequential, and can occur, e.g., in either order.

[1005] Methods described herein can include a positive selection step. For example, T cells can isolated by incubation with anti-CD3/anti-CD28 (e.g., 3×28)-conjugated beads, such as DYNABEADS® M-450 CD3/CD28 T, for a time period sufficient for positive selection of the desired T cells. In one embodiment, the time period is about 30 minutes. In a further embodiment, the time period ranges from 30 minutes to 36 hours or longer and all integer values there between. In a further embodiment, the time period is at least 1, 2, 3, 4, 5, or 6 hours. In yet another embodiment, the time period is 10 to 24 hours, e.g., 24 hours. Longer incubation times may be used to isolate T cells in any situation where there are few T cells as compared to other cell types, such in isolating tumor infiltrating lymphocytes (TIL) from tumor tissue or from immunocompromised individuals. Further, use of longer incubation times can increase the efficiency of capture of CD8+ T cells. Thus, by simply shortening or lengthening the time T cells are allowed to bind to the CD3/CD28 beads and/or by increasing or decreasing the ratio of beads to T cells (as described further herein), subpopulations of T cells can be preferentially selected for or against at culture initiation or at other time points during the process. Additionally, by increasing or decreasing the ratio of anti-CD3 and/or anti-CD28 antibodies on the beads or other surface, subpopulations of T cells can be preferentially selected for or against at culture initiation or at other desired time points.

[1006] In one embodiment, a T cell population can be selected that expresses one or more of IFN-γ, TNFα, IL-17A, IL-2, IL-3, IL-4, GM-CSF, IL-10, IL-13, granzyme B, and perforin, or other appropriate molecules, e.g., other cytokines. Methods for screening for cell expression can be determined, e.g., by the methods described in PCT Publication No.: WO 2013/126712.

[1007] For isolation of a desired population of cells by positive or negative selection, the concentration of cells and surface (e.g., particles such as beads) can be varied. In certain aspects, it may be desirable to significantly decrease the volume in which beads and cells are mixed together (e.g., increase the concentration of cells), to ensure maximum contact of cells and beads. For example, in one aspect, a concentration of 10 billion cells/ml, 9 billion/ml, 8 billion/ml, 7 billion/ml, 6 billion/ml, or 5 billion/ml is used. In one aspect, a concentration of 1 billion cells/ml is used. In yet one aspect, a concentration of cells from 75, 80, 85, 90, 95, or 100 million cells/ml is used. In further aspects, concentrations of 125 or 150 million cells/ml can be used.

[1008] Using high concentrations can result in increased cell yield, cell activation, and cell expansion. Further, use of high cell concentrations allows more efficient capture of cells that may weakly express target antigens of interest, such as CD28-negative T cells, or from samples where there are many tumor cells present (e.g., leukemic blood, tumor tissue, etc.). Such populations of cells may have therapeutic value and would be desirable to obtain. For example, using high concentration of cells allows more efficient selection of CD8+ T cells that normally have weaker CD28 expression.

[1009] In a related aspect, it may be desirable to use lower concentrations of cells. By significantly diluting the mixture of T cells and surface (e.g., particles such as beads), interactions between the particles and cells is minimized. This selects for cells that express high amounts of desired antigens to be bound to the particles. For example, CD4+ T cells express higher levels of CD28 and are more efficiently captured than CD8+ T cells in dilute concentrations. In one aspect, the concentration of cells used is 5×10⁶/ml.

[1010] In other aspects, the concentration used can be from about 1×10⁵/ml to 1×10⁶/ml, and any integer value in between.

[1011] In other aspects, the cells may be incubated on a rotator for varying lengths of time at varying speeds at either 2-10° C. or at room temperature.

[1012] T cells for stimulation can also be frozen after a washing step. Wishing not to be bound by theory, the freeze and subsequent thaw step provides a more uniform product by removing granulocytes and to some extent monocytes in the cell population. After the washing step that removes plasma and platelets, the cells may be suspended in a freezing solution. While many freezing solutions and parameters are known in the art and will be useful in this context, one method involves using PBS containing 20% DMSO and 8% human serum albumin, or culture media containing 10% Dextran 40 and 5% Dextrose, 20% Human Serum Albumin and 7.5% DMSO, or 31.25% Plasmalyte-A, 31.25% Dextrose 5%, 0.45% NaCl, 10% Dextran 40 and 5% Dextrose, 20% Human Serum Albumin, and 7.5% DMSO or other suitable cell freezing media containing for example, Hespan and PlasmaLyte A, the cells then are frozen to −80° C. at a rate of 1° per minute and stored in the vapor phase of a liquid nitrogen storage tank. Other methods of controlled freezing may be used as well as uncontrolled freezing immediately at −20° C. or in liquid nitrogen.

[1013] In certain aspects, cryopreserved cells are thawed and washed as described herein and allowed to rest for one hour at room temperature prior to activation using the methods of the present invention.

[1014] Also contemplated in the context of the invention is the collection of blood samples or apheresis product from a subject at a time period prior to when the expanded cells as described herein might be needed. As such, the source of the cells to be expanded can be collected at any time point necessary, and desired cells, such as T cells, isolated and frozen for later use in immune effector cell therapy for any number of diseases or conditions that would benefit from immune effector cell therapy, such as those described herein. In one aspect a blood sample or an apheresis is taken from a generally healthy subject. In certain aspects, a blood sample or an apheresis is taken from a generally healthy subject who is at risk of developing a disease, but who has not yet developed a disease, and the cells of interest are isolated and frozen for later use. In certain aspects, the T cells may be expanded, frozen, and used at a later time. In certain aspects, samples are collected from a patient shortly after diagnosis of a particular disease as described herein but prior to any treatments. In a further aspect, the cells are isolated from a blood sample or an apheresis from a subject prior to any number of relevant treatment modalities, including but not limited to treatment with agents such as natalizumab, efalizumab, antiviral agents, chemotherapy, radiation, immunosuppressive agents, such as cyclosporin, azathioprine, methotrexate, mycophenolate, and FK506, antibodies, or other immunoablative agents such as CAMPATH, anti-CD3 antibodies, cytoxan, fludarabine, cyclosporin, FK506, rapamycin, mycophenolic acid, steroids, FR901228, and irradiation.

[1015] In a further aspect of the present invention, T cells are obtained from a patient directly following treatment that leaves the subject with functional T cells. In this regard, it has been observed that following certain cancer treatments, in particular treatments with drugs that damage the immune system, shortly after treatment during the period when patients would normally be recovering from the treatment, the quality of T cells obtained may be optimal or improved for their ability to expand ex vivo. Likewise, following ex vivo manipulation using the methods described herein, these cells may be in a preferred state for enhanced engraftment and in vivo expansion. Thus, it is contemplated within the context of the present invention to collect blood cells, including T cells, dendritic cells, or other cells of the hematopoietic lineage, during this recovery phase. Further, in certain aspects, mobilization (for example, mobilization with GM-CSF) and conditioning regimens can be used to create a condition in a subject wherein repopulation, recirculation, regeneration, and/or expansion of particular cell types is favored, especially during a defined window of time following therapy. Illustrative cell types include T cells, B cells, dendritic cells, and other cells of the immune system.

[1016] In one embodiment, the immune effector cells expressing a CAR molecule, e.g., a CAR molecule described herein, are obtained from a subject that has received a low, immune enhancing dose of an mTOR inhibitor. In an embodiment, the population of immune effector cells, e.g., T cells, to be engineered to express a CAR, are harvested after a sufficient time, or after sufficient dosing of the low, immune enhancing, dose of an mTOR inhibitor, such that the level of PD1 negative immune effector cells, e.g., T cells, or the ratio of PD1 negative immune effector cells, e.g., T cells/PD1 positive immune effector cells, e.g., T cells, in the subject or harvested from the subject has been, at least transiently, increased.

[1017] In other embodiments, population of immune effector cells, e.g., T cells, which have, or will be engineered to express a CAR, can be treated ex vivo by contact with an amount of an mTOR inhibitor that increases the number of PD1 negative immune effector cells, e.g., T cells or increases the ratio of PD1 negative immune effector cells, e.g., T cells/PD1 positive immune effector cells, e.g., T cells.

[1018] In one embodiment, a T cell population is diaglycerol kinase (DGK)-deficient. DGK-deficient cells include cells that do not express DGK RNA or protein, or have reduced or inhibited DGK activity. DGK-deficient cells can be generated by genetic approaches, e.g., administering RNA-interfering agents, e.g., siRNA, shRNA, miRNA, to reduce or prevent DGK expression. Alternatively, DGK-deficient cells can be generated by treatment with DGK inhibitors described herein.

[1019] In one embodiment, a T cell population is Ikaros-deficient. Ikaros-deficient cells include cells that do not express Ikaros RNA or protein, or have reduced or inhibited Ikaros activity, Ikaros-deficient cells can be generated by genetic approaches, e.g., administering RNA-interfering agents, e.g., siRNA, shRNA, miRNA, to reduce or prevent Ikaros expression. Alternatively, Ikaros-deficient cells can be generated by treatment with Ikaros inhibitors, e.g., lenalidomide.

[1020] In embodiments, a T cell population is DGK-deficient and Ikaros-deficient, e.g., does not express DGK and Ikaros, or has reduced or inhibited DGK and Ikaros activity. Such DGK and Ikaros-deficient cells can be generated by any of the methods described herein.

[1021] In an embodiment, the NK cells are obtained from the subject. In another embodiment, the NK cells are an NK cell line, e.g., NK-92 cell line (Conkwest).

[1022] In some aspects, the cells of the invention (e.g., the immune effector cells of the invention, e.g., the CAR-expressing cells of the invention) are induced pluripotent stem cells (“iPSCs”) or embryonic stem cells (ESCs), or are T cells generated from (e.g., differentiated from) said iPSC and/or ESC. iPSCs can be generated, for example, by methods known in the art, from peripheral blood T lymphocytes, e.g., peripheral blood T lymphocytes isolated from a healthy volunteer. As well, such cells may be differentiated into T cells by methods known in the art. See e.g., Themeli M. et al., Nat. Biotechnol., 31, pp. 928-933 (2013); doi:10.1038/nbt.2678; WO2014/165707, the contents of each of which are incorporated herein by reference in their entirety.

### Additional Expressed Agents

[1023] In another embodiment, a CAR-expressing immune effector cell described herein can further express another agent, e.g., an agent which enhances the activity of a CAR-expressing cell. For example, in one embodiment, the agent can be an agent which inhibits an inhibitory molecule. Examples of inhibitory molecules include PD-1, PD-L1, CTLA-4, TIM-3, CEACAM (e.g., CEACAM-1, CEACAM-3 and/or CEACAM-5), LAG-3, VISTA, BTLA, TIGIT, LAIR1, CD160, 2B4 and TGF beta, e.g., as described herein. In one embodiment, the agent that inhibits an inhibitory molecule comprises a first polypeptide, e.g., an inhibitory molecule, associated with a second polypeptide that provides a positive signal to the cell, e.g., an intracellular signaling domain described herein. In one embodiment, the agent comprises a first polypeptide, e.g., of an inhibitory molecule such as PD-1, PD-L1, CTLA-4, TIM-3, CEACAM (e.g., CEACAM-1, CEACAM-3 and/or CEACAM-5), LAG-3, VISTA, BTLA, TIGIT, LAIR1, CD160, 2B4 or TGF beta, or a fragment of any of these, and a second polypeptide which is an intracellular signaling domain described herein (e.g., comprising a costimulatory domain (e.g., 41BB, CD27 or CD28, e.g., as described herein) and/or a primary signaling domain (e.g., a CD3 zeta signaling domain described herein). In one embodiment, the agent comprises a first polypeptide of PD-1 or a fragment thereof, and a second polypeptide of an intracellular signaling domain described herein (e.g., a CD28, CD27, OX40 or 4-IBB signaling domain described herein and/or a CD3 zeta signaling domain described herein). In embodiments, the agent comprises a first polypeptide of an extracellular domain of an inhibitory molecule and a second polypeptide of an intracellular signaling domain of a costimulatory molecule described herein or primary signaling molecule described herein. Such molecules in which an inhibitory molecule (e.g., a domain of an inhibitory molecule) is associated with a molecule that provides a positive signal (e.g., a domain of a costimulatory molecule or primary signaling molecule) are further described in, for example, WO2013/019615.

[1024] In one embodiment, the CAR-expressing immune effector cell described herein can further comprise a second CAR, e.g., a second CAR that includes a different antigen binding domain, e.g., to the same target (e.g., a target described above) or a different target. In one embodiment, the second CAR includes an antigen binding domain to a target expressed on the same cancer cell type as the target of the first CAR. In one embodiment, the CAR-expressing immune effector cell comprises a first CAR that targets a first antigen and includes an intracellular signaling domain having a costimulatory signaling domain but not a primary signaling domain, and a second CAR that targets a second, different, antigen and includes an intracellular signaling domain having a primary signaling domain but not a costimulatory signaling domain.

[1025] While not wishing to be bound by theory, placement of a costimulatory signaling domain, e.g., 4-1BB, CD28, CD27 or OX-40, onto the first CAR, and the primary signaling domain, e.g., CD3 zeta, on the second CAR can limit the CAR activity to cells where both targets are expressed. In one embodiment, the CAR expressing immune effector cell comprises a first CAR that includes an antigen binding domain that targets, e.g., a target described above, a transmembrane domain and a costimulatory domain and a second CAR that targets an antigen other than antigen targeted by the first CAR (e.g., an antigen expressed on the same cancer cell type as the first target) and includes an antigen binding domain, a transmembrane domain and a primary signaling domain. In another embodiment, the CAR expressing immune effector cell comprises a first CAR that includes an antigen binding domain that targets, e.g., a target described above, a transmembrane domain and a primary signaling domain and a second CAR that targets an antigen other than antigen targeted by the first CAR (e.g., an antigen expressed on the same cancer cell type as the first target) and includes an antigen binding domain to the antigen, a transmembrane domain and a costimulatory signaling domain.

[1026] In one embodiment, the CAR-expressing immune effector cell comprises a CAR described herein, e.g., a CAR to a target described above, and an inhibitory CAR. In one embodiment, the inhibitory CAR comprises an antigen binding domain that binds an antigen found on normal cells but not cancer cells, e.g., normal cells that also express the target. In one embodiment, the inhibitory CAR comprises the antigen binding domain, a transmembrane domain and an intracellular domain of an inhibitory molecule. For example, the intracellular domain of the inhibitory CAR can be an intracellular domain of PD1, PD-L1, CTLA-4, TIM-3, CEACAM (e.g., CEACAM-1, CEACAM-3 and/or CEACAM-5), LAG-3, VISTA, BTLA, TIGIT, LAIR1, CD160, 2B4 or TGF beta.

[1027] In one embodiment, an immune effector cell (e.g., T cell, NK cell) comprises a first CAR comprising an antigen binding domain that binds to a tumor antigen as described herein, and a second CAR comprising a PD1 extracellular domain or a fragment thereof.

[1028] In one embodiment, the cell further comprises an inhibitory molecule as described above.

[1029] In one embodiment, the second CAR in the cell is an inhibitory CAR, wherein the inhibitory CAR comprises an antigen binding domain, a transmembrane domain, and an intracellular domain of an inhibitory molecule. The inhibitory molecule can be chosen from one or more of: PD1, PD-L1, CTLA-4, TIM-3, LAG-3, VISTA, BTLA, TIGIT, LAIR1, CD160, 2B4, TGF beta, CEACAM-1, CEACAM-3, and CEACAM-5. In one embodiment, the second CAR molecule comprises the extracellular domain of PD1 or a fragment thereof.

[1030] In embodiments, the second CAR molecule in the cell further comprises an intracellular signaling domain comprising a primary signaling domain and/or an intracellular signaling domain.

[1031] In other embodiments, the intracellular signaling domain in the cell comprises a primary signaling domain comprising the functional domain of CD3 zeta and a costimulatory signaling domain comprising the functional domain of 4-1BB.

[1032] In one embodiment, the second CAR molecule in the cell comprises the amino acid sequence of SEQ ID NO: 6654.

[1033] In certain embodiments, the antigen binding domain of the first CAR molecule comprises a scFv and the antigen binding domain of the second CAR molecule does not comprise a scFv. For example, the antigen binding domain of the first CAR molecule comprises a scFv and the antigen binding domain of the second CAR molecule comprises a camelid VHH domain.

[1034] In other aspects and embodiments, a cell of the invention, e.g., a cell engineered to express a CAR, is also engineered to express a safety molecule, such as a molecule (or set of molecules) which mediates the depleting of the cells, e.g., CAR T cells, when appropriate (e.g., after the T cells have accomplished the anti-tumor function, or if the T cells are causing life-threatening side effects). In one exemplary aspect, the safety molecule a molecule that does not affect the function of the cell, but which can be targeted by another agent, e.g., an antibody or ADC molecule targeting said molecule. One exemplary embodiment of such a molecule is a truncated receptor, e.g., a receptor comprising the extracellular domain and transmembrane domain of a receptor, but lacking all or a substantial portion of the intracellular domain of the receptor. An example is a truncated EGFR receptor, e.g., as described in WO2011/056894. Without being bound by theory, targeting said truncated EGFR receptor with an anti-EGFR antibody, e.g., cetuximab, will depelete cells expressing the truncated EGFR receptor. A second example is a iCasp9 switch polypeptide, e.g., a polypeptide having a dimerization domain, an optional linker, and a caspase domain oriented such that, when expressed in the presence of a dimerization compound in a mammalian host cell, the iCasp9 switch polypeptide homo-dimerizes, resulting in apoptosis of the host cell. In embodiments, the dimerization domain is a FKBP-based dimerization domain, e.g., the sequence harbors a mutation (F37V) which provides a complementary fitting cavity for AP1903 and AP1903-structurally related ligands (such as AP20187), which molecules may act as a dimerization compound. Such iCasp9 switch polypeptides (and associated dimerization compounds) are described in, for example, WO1997/031899, US2011/286980, WO2014/164348, WO2013/040371, US2013/071414, WO2014/255360, and N Engl J Med. 2011 Nov. 3; 365(18):1673-83. A third example of such a molecule is a molecule targeted by an anti-CD20 antibody, wherein, for example, administering an anti-CD20 antibody (e.g., rituximab) allows said cells to be depleted. Examples of molecules targeted by an anti-CD20 antibody include CD20, and truncated versions thereof (e.g., molecules comprising an extracellular domain recognizable by an anti-CD20 antibody, a transmembrane domain, and lacking at least a portion of an intracellular domain).

[1035] In other aspects and embodiments, the cell of the invention, e.g., a cell engineered to express a CAR, is also engineered to express an NK inhibitory molecule. As used herein, the term “NK inhibitory molecule” refers to a molecule which inhibits a function, e.g., a cytolytic function, of NK cells. Without being bound by theory, it is believed that a cell, e.g., a cell of the invention, which has reduced or eliminated expression of one or more MHC class I molecules (e.g., which have reduced or eliminated expression of B2M, NLRC5 and/or CIITA, e.g., by introduction of a CRISPR system targeting B2M, NLRC5 and/or CIITA as described herein into said cell) may be recognized by NK cells as non-self, and targeted for cytolysis. Thus, expression of one or more NK inhibitory molecules on said cell protects it from NK cell destruction. In one aspect, the NK inhibitory molecule is a ligand for an NK inhibitory receptor. Non-limiting examples of NK inhibitory receptors include NK cell surface receptors which have or which associate with an immunoreceptor tyrosine-based inhibitory motif (ITIM). Non-limiting examples of such receptors include 2B4 (also known as CD244); a member of the NK-cell-receptor protein 1(NKR—P1) family (e.g., NKR-P1A, NKR—P1B, NKR—P1C, NKR-P1D, NKR-P1 E and NKR—P1F, e.g., NKR—P1B and NKR-P1D); a member of the carcinoembryonic-antigen-related cell-adhesion molecule (CEACAM) family (e.g., CEACAM1); Sialic acid-binding immunoglobulin-like lectin (SIGLEC) family members (e.g., SIGLEC7 and SIGLEC9); Leukocyte-associated immunoglobulin-like receptor 1 (LAIR1); Glycoprotein 49 B1 (gp49B1) or human homolog thereof; CD81; and a member of the signal-regulatory protein (SIRP) family. In embodiments, the NK inhibitory molecule is a non-MHC class I molecule. Non-limiting examples of NK inhibitory molecules include ligands for the aforementioned receptors, e.g., CD48, a member of the C-type lectin-related family (e.g., CLR-B (also known as OCIL), CLR-F and CLR-G (also known as OCILrP2)), CEACAM1, a polypeptide displaying sialic acid, and alpha V beta 3 integrin. In embodiments, the NK inhibitory molecule is a fragment of a naturally occurring molecule, e.g., comprises the extracellular domain and transmembrane domain of the NK inhibitory molecule, but lacks the all or a portion of the intracellular domain (e.g., lacks an intracellular ITIM or inhibitory domain). In other embodiments, the NK inhibitory molecule is an HLA-G molecule. HLA-G has been shown to arrest or reduce the function of the immune system, e.g., NK cells. Carosella et al., Advances in Immunol., vol. 127, pp. 33-144, 2015; Torikai H. et al., Blood, vol. 122(8), pp. 1341-1349, 2013. Without being bound by theory, the presence of HLA-G on the surface of a CAR-expressing cell, e.g., an allogeneic CAR-expressing cell, e.g., as described herein, e.g., a CAR-expressing cell that has reduced or eliminated expression of TCR, (B2M or NLRC5) and/or CIITA, e.g., as described herein, may protect the cell from NK cell attack. In embodiments, the NK inhibitory molecule is an isoform of HLA-G that does not require B2M, e.g., HLA-G2, HLA-G3, HLA-G4. Such embodiments are preferred with the cell of the invention, e.g., as described herein comprises an agent or system (e.g., a CRISPR/Cas system, e.g., as described herein) which inhibits the function and/or expression of B2M. Alternatively, in other embodiments in which the cell of the invention, e.g., as described herein, comprises (or at any time comprised) an agent or system (e.g., a CRISPR/Cas system, e.g., as described herein) which inhibits the function and/or expression of B2M (i.e., a cell in which the function and/or expression of B2M has been reduced or eliminated, e.g., as described herein), the NK inhibitory molecule may be an HLA-G molecule which under natural conditions forms a complex with B2M, provided that the NK inhibitory molecule comprises a fusion with a B2M molecule. Such fusions, and methods for their creation, are known in the art. See, e.g., Favier B, HoWangYin K Y, Wu J, Caumartin J, Daouya M, et al. (2011) Tolerogenic Function of Dimeric Forms of HLA-G Recombinant Proteins: A Comparative Study In Vivo. PLoS ONE 6(7): e21011. doi:10.1371/journal.pone.0021011. In such embodiments, to the extent the gene encoding the HLA-G:B2M fusion molecule comprises a B2M-encoding sequence which comprises a target sequence of a B2M targeting gRNA molecule, the sequence of said nucleic acid may be altered to reduce or eliminate binding of the gRNA to the HLA-G:B2M fusion-encoding nucleic acid so that expression and/or function of the HLA-G:B2M fusion is not reduced or eliminated. In embodiments, the HLA-G:B2M fusion may further comprise a transmembrane domain or sequence suitable for attachment of a membrane anchor molecule (such as a GPI anchor). An exemplary HLA-G:B2M fusion molecule (e.g., an HLA-G1:B2M fusion molecule) is provided below ((G4S)3 linker (SEQ ID NO: 6594) is indicated in bold text). The linker may be present or absent, and may alternatively comprise any peptidic linker, e.g., as described herein). This particular construct has the format B2M-linker ((G4S)3)-HLA-G:

SEQ ID NO: 10674
MSRSVALAVLALLSLSGLEAIQRTPKIQVYSRHPAENGKSNFLNCYVSG
FHPSDIEVDLLKNGERIEKVEHSDLSFSKDWSFYLLYYTEFTPTEKDEY
ACRVNHVTLSQPKIVKWDRDM [symbol] GGGGSGGGGSGGGGS
GSHSMRYFSAAVSRPGRGEPRFIAMGYVDDTQFVREDSDSACPRMEPRA
PWVEQEGPEYWEEETRNTKAHAQTDRMNLQTLRGYYNQSEASSHTLQWM
IGCDLGSDGRLLRGYEQYAYDGKDYLALNEDLRSWTAADTAAQISKRKC
EAANVAEQRRAYLEGTCVEWLHRYLENGKEMLQRADPPKTHVTHHPVED
YEATLRCWALGFYPAEIILTWQRDGEDQTQDVELVETRPAGDGTFQKWA
AVVVPSGEEQRYTCHVQHEGLPEPLMLRWKQSSLPTIPIMGIVAGLVVL
AAVVTGAAVAAVLWRKKSSD

[1036] An exemplary codon-optimized nucleic acid sequence encoding the above HLA-G:B2M fusion is provided below:

SEQ ID NO: 10675
GCC ACC ATG AGC AGA TCT GTG GCC CTG GCT GTG CTG GCC CTG CTG TCT CTG
TCT GGC CTG GAA GCC ATC CAG CGG ACC CCC AAG ATC CAG GTG TAC AGC AGA
CAC CCC GCC GAA AAC GGC AAG AGC AAC TTC CTG AAC TGC TAC GTG TCC GGC
TTC CAC CCC AGC GAC ATC GAG GTG GAC CTG CTG AAG AAC GGC GAG CGG ATC
GAA AAG GTG GAA CAT AGC GAC CTG AGC TTC AGC AAG GAC TGG TCC TTC TAC
CTG CTG TAC TAC ACC GAG TTC ACC CCC ACC GAA AAG GAC GAG TAC GCC TGC
AGA GTG AAC CAC GTG ACC CTG AGC CAG CCC AAG ATC GTG AAG TGG GAC CGG
GAT ATG GGC GGA GGC GGA TCC GGC GGC GGA GGA TCA GGG GGG GGA GGG TCC
GGA TCC CAC AGC ATG CGG TAC TTC TCT GCC GCC GTG TCC AGA CCT GGA AGA
GGC GAG CCC CGG TTT ATC GCC ATG GGC TAC GTG GAC GAC ACC CAG TTC GTC
AGA TTC GAC AGC GAC AGC GCC TGC CCC CGG ATG GAA CCT AGA GCA CCT TGG
GTG GAA CAG GAA GGC CCC GAG TAC TGG GAG GAA GAG ACA CGG AAC ACC AAG
GCC CAC GCC CAG ACC GAC AGA ATG AAC CTG CAG ACC CTG CGG GGC TAC TAC
AAC CAG AGC GAG GCC AGC AGC CAC ACC CTG CAG TGG ATG ATC GGC TGC GAT
CTG GGC AGC GAC GGC AGA CTG CTG AGA GGT TAC GAA CAG TAC GCC TAC GAC
GGC AAG GAC TAC CTG GCC CTG AAC GAG GAC CTG CGG TCT TGG ACA GCC GCC
GAT ACA GCC GCC CAG ATC AGC AAG AGA AAG TGC GAG GCC GCC AAC GTG GCC
GAG CAG AGA AGG GCT TAC CTG GAA GGC ACC TGT GTG GAA TGG CTG CAT AGA
TAC CTG GAA AAC GGC AAA GAG ATG CTG CAG CGG GCC GAC CCC CCT AAG ACA
CAC GTG ACA CAC CAC CCC GTG TTC GAC TAC GAG GCC ACC CTG AGA TGT TGG
GCC CTG GGC TTC TAT CCT GCC GAG ATC ATC CTG ACC TGG CAG AGG GAT GGC
GAG GAC CAG ACC CAG GAC GTG GAA CTG GTG GAA ACC AGA CCT GCC GGC GAC
GGC ACC TTC CAG AAA TGG GCT GCT GTG GTG GTG CCC AGC GGC GAA GAA CAG
AGA TAC ACC TGT CAC GTG CAG CAC GAG GGC CTG CCC GAA CCC CTG ATG CTG
AGA TGG AAG CAG AGC AGC CTG CCC ACC ATC CCC ATC ATG GGA ATC GTG GCC
GGA CTG GTG GTG CTG GCC GCT GTC GTG ACA GGC GCT GCA GTG GCC GCC GTG
CTG TGG CGG AAG AAG TCC AGC GAC TAA

[1037] Another exemplary HLA-G molecule, which may be combined with a B2M sequence, or used without, is provided below (optional leader sequence is indicated in bold text):

SEQ ID NO: 10676 [symbol] [symbol]
MVVMAPRTLFLLLSGALTLTETWAGSH
SMRYFSAAVSRPSRGEPRFIAMGYVDDTQFVREDSDSACPRMEPRAPWV
EREGPEYWEEETRNTKAHAQTDRMNLQTLRGYYNQSEASSHTLQWMIGC
DLGSDGRLLRGYEQYAYDGKDYLALNEDLRSWTAADTAAQISKRKCEAA
NVAEQRRAYLEGTCVEWLHRYLENGKEMLQRADPPKTHVTHHPVEDYEA
TLRCWALGFYPAEIILTWQRDGEDQTQDVELVETKPAGDGTFQKWAAVV
VPSGEEQRYTCHVQHEGLPEPLMLRWKQSSLPTIPIMGIVAGLVVLAAV
VTGAAVAAVLWRKKSSD

[1038] In other embodiments where the NK inhibitory molecule requires B2M, and it is desirable to reduce or eliminate expression of one or more HLA Class I molecules, a CRISPR/Cas system (e.g., as described herein) may be used which comprises a gRNA comprising a targeting domain which is complementary to a target sequence of NLRC5 (human NLRC5: Entrez 84166; UniProt Q86WI3) or its regulatory elements, e.g., a gRNA which comprises a targeting domain listed in Table 1 to NLRC5 (or a fragment of such targeting domain, e.g., the 3′ 20 nucleotides of such targeting domain, listed in Table 1 to NLRC5; e.g., a gRNA comprising a targeting domain comprising of any one of SEQ ID NO: 8622 to SEQ ID NO: 10089 or fragment (e.g., 3′ 20 nucleotide fragment) thereof). Without being bound by theory, it is believed that reduced or eliminated expression and/or function of NLRC5 will reduce or eliminate expression and/or function of one or more MHC Class I molecules, even in the presence of B2M. See e.g., Downs, I., Vijayan, S., Sidiq, T. and Kobayashi, K. S. (2016), CITA/NLRC5: A critical transcriptional regulator of MHC class I gene expression. BioFactors, 42: 349-357. doi:10.1002/biof 0.1285.

[1039] In other embodiments, the NK inhibitory molecule is a membrane-bound isoform of HLA-G, e.g., HLA-G1, HLA-G2, HLA-G3 and/or HLA-G4. In other embodiments, the NK inhibitory molecule is a soluble isoform of HLA-G, e.g., sHLA-G1 (shed), HLA-G5, HLA-G6, and/or HLA-G7. In embodiments, the NK inhibitory molecule is selected from one or more of HLA-G2, HLA-G3 and HLA-G4. In an embodiment, the NK inhibitory molecule is HLA-G2.

[1040] In other embodiments, the NK inhibitory molecule is an HLA-E molecule. HLA-E has been shown to arrest or reduce the function of NK cells against HLA Class I-negative cells. Torikai H. et al., Blood, vol. 122(8), pp. 1341-1349, 2013. Without being bound by theory, the presence of HLA-E on the surface of a CAR-expressing cell, e.g., an allogeneic CAR-expressing cell, e.g., as described herein, e.g., a CAR-expressing cell that has reduced or eliminated expression of TCR, (B2M or NLRC5) and/or CIITA, e.g., as described herein, may protect the cell from NK cell attack. In an embodiment, the NK inhibitory molecule is an HLA-G molecule and an HLA-E molecule.

[1041] In embodiments where the cell of the invention, e.g., the CAR expressing cell of the invention, e.g., as described herein, is engineered to express an NK inhibitory molecule, the cell may be further engineered to reduce or eliminate expression and/or function of one or more ligands or binding partners of said NK inhibitory molecule (herein referred to as “target of an NK inhibitory molecule”). Without being bound by theory, it is believed that reduction or elimination of expression and/or function, e.g., surface expression, of a target of an NK inhibitory molecule will reduce or avoid inhibition of the cell of interest, e.g., the CAR expressing cell of the invention, e.g., as described herein, by the expression of the NK inhibitory molecule, thereby improving the function of the cell of the invention, e.g., the CAR expressing cell of the invention, e.g., as described herein. In other embodiments, the inhibitory effects of the NK inhibitory molecule may be reduced or eliminated in the cell of interest, e.g., the CAR expressing cell of the invention, e.g., as described herein, by expressing a dominant negative mutant or fragment of the target of an NK inhibitory molecule, e.g., a target of an NK inhibitory molecule which has a modified or eliminated (partially or wholly) intracellular inhibitory domain (e.g., one or more ITIM domains), such that the inhibitory signal is not propagated upon binding of the NK inhibitory molecule. In embodiments where the NK inhibitory molecule is an HLA-G molecule, e.g., as described herein, the target of an NK inhibitory molecule is LILRB1 (e.g., human LILRB1: Entrez: 10859; UniProt Q8NHL6). In embodiments, the reduction or elimination of expression and/or function of the target of an NK inhibitory molecule, e.g., LILRB1, is accomplished by introducing a nucleic acid inhibitor of the target of an NK inhibitory molecule (e.g., an shRNA or siRNA molecule specific for LILRB1). In other embodiments, the reduction or elimination of expression and/or function of the target of an NK inhibitory molecule, e.g., LILRB1, is accomplished by introducing a gene editing system, e.g. a CRISPR/Cas gene editing system, e.g., as described herein, which recognizes a target sequence in the gene or its regulatory elements of the target of an NK inhibitory molecule (e.g., recognizes a target sequence in the LILRB1 gene or its regulatory elements), such that expression and/or function of the target of an NK inhibitory molecule, e.g., LILRB1, is reduced or eliminated. In embodiments, where the target of an NK inhibitory molecule is LILRB1, the gene editing system is a CRISPR/Cas system, e.g., as described herein, comprising a gRNA molecule comprising a targeting domain listed in Table 6d (or, as described herein, comprising a fragment, e.g., a 20 nucleotide fragment, e.g., the 3′ 20 nucleotides, of a targeting domain listed in Table 6d).

[1042] In embodiments and aspects, the invention relates to a cell, e.g., an immune effector cell, (or population of said cells) comprising nucleic acid encoding an NK inhibitory molecule, e.g., such that the NK inhibitory molecule is expressed in said cell, e.g., comprises nucleic acid encoding an NK inhibitory molecule operably linked to a promoter operable in the cell. In embodiments, the nucleic acid molecule encoding an NK inhibitory molecule comprises additional sequence encoding a CAR. In embodiments, the nucleic acid sequence encoding an NK inhibitory molecule and the nucleic acid sequence encoding a CAR are operably linked to separate promoters, as described herein. In other embodiments, an NK inhibitory molecule the nucleic acid sequence encoding an NK inhibitory molecule and the nucleic acid sequence encoding a CAR are expressed from a single promoter, optionally with a sequence encoding a cleavable peptide (e.g., a 2A peptide) disposed between the sequences encoding the two molecules.

[1043] The cell of the invention, e.g., the cells engineered to express a CAR, may be engineered to express more than one of the additional molecules described above. In embodiments, the cell is engineered to express a CAR, e.g., as described herein, an iCasp9 switch polypeptide and an NK inhibitory molecule.

[1044] In embodiments and aspects, a cell of the invention, e.g., an immune effector cell (or population of said cells), e.g., a CAR-expressing cell as described herein, has reduced or eliminated expression of the protein comprising the target antigen of the CAR molecule (e.g., a target antigen described herein). Such reduced or eliminated expression of the protein comprising the target antigen of the CAR molecule may be affected, by for example, introducing a mutation (e.g., an indel) within the gene sequence encoding said protein comprising the target antigen (or its regulatory elements) using a gene editing system, e.g., a CRISPR gene editing system (e.g., comprising a gRNA molecule complementary to a target sequence within said gene), e.g., described herein. Without being bound by theory, reduced or eliminated expression of the protein comprising the target antigen of the CAR molecule may protect said CAR-expressing cells from self-recognition and/or attack. In embodiments, the reduced or eliminated expression of said protein comprising the target antigen of the CAR molecule is relative to the expression of said protein comprising the target antigen of the CAR molecule in a resting cell, e.g., resting T cell. In other embodiments, the reduced or eliminated expression of said protein comprising the target antigen of the CAR molecule is relative to the expression of said protein comprising the target antigen of the CAR molecule in an activated cell, e.g., an activated T cell, e.g., a T cell activated by CD3 and/or CD28 stimulation, or by activation through signaling of the CAR molecule.

### Split CAR

[1045] In some embodiments, the CAR-expressing cell uses a split CAR. The split CAR approach is described in more detail in publications WO2014/055442 and WO2014/055657. Briefly, a split CAR system comprises a cell expressing a first CAR having a first antigen binding domain and a costimulatory domain (e.g., 41BB), and the cell also expresses a second CAR having a second antigen binding domain and an intracellular signaling domain (e.g., CD3 zeta). When the cell encounters the first antigen, the costimulatory domain is activated, and the cell proliferates. When the cell encounters the second antigen, the intracellular signaling domain is activated and cell-killing activity begins. Thus, the CAR-expressing cell is only fully activated in the presence of both antigens.

### Multiple CAR Expression

[1046] In one aspect, the CAR-expressing cell described herein can further comprise a second CAR, e.g., a second CAR that includes a different antigen binding domain, e.g., to the same target or a different target (e.g., a target other than a cancer associated antigen described herein or a different cancer associated antigen described herein). In one embodiment, the second CAR includes an antigen binding domain to a target expressed the same cancer cell type as the cancer associated antigen. In one embodiment, the CAR-expressing cell comprises a first CAR that targets a first antigen and includes an intracellular signaling domain having a costimulatory signaling domain but not a primary signaling domain, and a second CAR that targets a second, different, antigen and includes an intracellular signaling domain having a primary signaling domain but not a costimulatory signaling domain. While not wishing to be bound by theory, placement of a costimulatory signaling domain, e.g., 4-1BB, CD28, CD27 or OX-40, onto the first CAR, and the primary signaling domain, e.g., CD3 zeta, on the second CAR can limit the CAR activity to cells where both targets are expressed. In one embodiment, the CAR expressing cell comprises a first cancer associated antigen CAR that includes an antigen binding domain that binds a target antigen described herein, a transmembrane domain and a costimulatory domain and a second CAR that targets a different target antigen (e.g., an antigen expressed on that same cancer cell type as the first target antigen) and includes an antigen binding domain, a transmembrane domain and a primary signaling domain. In another embodiment, the CAR expressing cell comprises a first CAR that includes an antigen binding domain that binds a target antigen described herein, a transmembrane domain and a primary signaling domain and a second CAR that targets an antigen other than the first target antigen (e.g., an antigen expressed on the same cancer cell type as the first target antigen) and includes an antigen binding domain to the antigen, a transmembrane domain and a costimulatory signaling domain.

[1047] In some embodiments, the claimed invention comprises a first and second CAR, wherein the antigen binding domain of one of said first CAR said second CAR does not comprise a variable light domain and a variable heavy domain. In some embodiments, the antigen binding domain of one of said first CAR said second CAR is an scFv, and the other is not an scFv. In some embodiments, the antigen binding domain of one of said first CAR said second CAR comprises a single VH domain, e.g., a camelid, shark, or lamprey single VH domain, or a single VH domain derived from a human or mouse sequence. In some embodiments, the antigen binding domain of one of said first CAR said second CAR comprises a nanobody. In some embodiments, the antigen binding domain of one of said first CAR said second CAR comprises a camelid VHH domain.

### Telomerase Expression

[1048] While not wishing to be bound by any particular theory, in some embodiments, a therapeutic T cell has short term persistence in a patient, due to shortened telomeres in the T cell; accordingly, transfection with a telomerase gene can lengthen the telomeres of the T cell and improve persistence of the T cell in the patient. See Carl June, “Adoptive T cell therapy for cancer in the clinic”, Journal of Clinical Investigation, 117:1466-1476 (2007). Thus, in an embodiment, an immune effector cell, e.g., a T cell, ectopically expresses a telomerase subunit, e.g., the catalytic subunit of telomerase, e.g., TERT, e.g., hTERT. In some aspects, this disclosure provides a method of producing a CAR-expressing cell, comprising contacting a cell with a nucleic acid encoding a telomerase subunit, e.g., the catalytic subunit of telomerase, e.g., TERT, e.g., hTERT. The cell may be contacted with the nucleic acid before, simultaneous with, or after being contacted with a construct encoding a CAR.

[1049] In embodiments in which a cell is engineered to express more than one molecule, sequence encoding each of said molecules (e.g., sequence encoding a CAR and sequence encoding an NK inhibitory molecule) can be disposed on the same nucleic acid molecule, e.g., the same plasmid or vector, e.g., viral vector, e.g., lentiviral vector. In an embodiment, (i) sequence encoding a CAR, as described herein, and (ii) sequence encoding an NK inhibitory molecule, as described herein, can be present on the same nucleic acid, e.g., vector. Production of the corresponding proteins can be achieved, e.g., by the use of separate promoters, or by the use of a bicistronic transcription product (which can result in the production of two proteins by cleavage of a single translation product or by the translation of two separate protein products). In an embodiment, a sequence encoding a cleavable peptide, e.g., a P2A, T2A or F2A sequence, is disposed between (i) and (ii). In an embodiment, a sequence encoding an IRES, e.g., an EMCV or EV71 IRES, is disposed between (i) and (ii). In these embodiments, (i) and (ii) are transcribed as a single RNA. In other aspects, each molecule may be expressed from a different promoter. In an embodiment, a first promoter is operably linked to (i) and a second promoter is operably linked to (ii), such that (i) and (ii) are transcribed as separate mRNAs.

[1050] Alternatively, the sequence encoding the more than one molecules can be disposed on the different nucleic acid molecules, e.g., different plasmids or vectors, e.g., viral vector, e.g., lentiviral vector. E.g., the (i) sequence encoding a CAR as described herein can be present on a first nucleic acid, e.g., a first vector, and the (ii) sequence encoding a NK inhibitory molecule can be present on the second nucleic acid, e.g., the second vector.

TABLE 7
Exemplary sequences of various components of CAR (aa-amino acids, na-nucleic acids that
encodes the corresponding protein)

| SEQ | | | Corresp. |
|---|---|---|---|
| ID | | | To |
| NO | description | Sequence | huCD19 |
| 6639 | EF-1 | CGTGAGGCTCCGGTGCCCGTCAGTGGGCAGAGCGCACA | 100 |
| | promoter | TCGCCCACAGTCCCCGAGAAGTTGGGGGGAGGGGTCGG | |
| | | CAATTGAACCGGTGCCTAGAGAAGGTGGCGCGGGGTAA | |
| | | ACTGGGAAAGTGATGTCGTGTACTGGCTCCGCCTTTTTC | |
| | | CCGAGGGTGGGGGAGAACCGTATATAAGTGCAGTAGTC | |
| | | GCCGTGAACGTTCTTTTTCGCAACGGGTTTGCCGCCAGA | |
| | | ACACAGGTAAGTGCCGTGTGTGGTTCCCGCGGGCCTGG | |
| | | CCTCTTTACGGGTTATGGCCCTTGCGTGCCTTGAATTAC | |
| | | TTCCACCTGGCTGCAGTACGTGATTCTTGATCCCGAGCT | |
| | | TCGGGTTGGAAGTGGGTGGGAGAGTTCGAGGCCTTGCG | |
| | | CTTAAGGAGCCCCTTCGCCTCGTGCTTGAGTTGAGGCCT | |
| | | GGCCTGGGCGCTGGGGCCGCCGCGTGCGAATCTGGTGG | |
| | | CACCTTCGCGCCTGTCTCGCTGCTTTCGATAAGTCTCTA | |
| | | GCCATTTAAAATTTTTGATGACCTGCTGCGACGCTTTTT | |
| | | TTCTGGCAAGATAGTCTTGTAAATGCGGGCCAAGATCT | |
| | | GCACACTGGTATTTCGGTTTTTGGGGCCGCGGGCGGCG | |
| | | ACGGGGCCCGTGCGTCCCAGCGCACATGTTCGGCGAGG | |
| | | CGGGGCCTGCGAGCGCGGCCACCGAGAATCGGACGGG | |
| | | GGTAGTCTCAAGCTGGCCGGCCTGCTCTGGTGCCTGGC | |
| | | CTCGCGCCGCCGTGTATCGCCCCGCCCTGGGCGGCAAG | |
| | | GCTGGCCCGGTCGGCACCAGTTGCGTGAGCGGAAAGAT | |
| | | GGCCGCTTCCCGGCCCTGCTGCAGGGAGCTCAAAATGG | |
| | | AGGACGCGGCGCTCGGGAGAGCGGGCGGGTGAGTCAC | |
| | | CCACACAAAGGAAAAGGGCCTTTCCGTCCTCAGCCGTC | |
| | | GCTTCATGTGACTCCACGGAGTACCGGGCGCCGTCCAG | |
| | | GCACCTCGATTAGTTCTCGAGCTTTTGGAGTACGTCGTC | |
| | | TTTAGGTTGGGGGGAGGGGTTTTATGCGATGGAGTTTC | |
| | | CCCACACTGAGTGGGTGGAGACTGAAGTTAGGCCAGCT | |
| | | TGGCACTTGATGTAATTCTCCTTGGAATTTGCCCTTTTT | |
| | | GAGTTTGGATCTTGGTTCATTCTCAAGCCTCAGACAGTG | |
| | | GTTCAAAGTTTTTTTCTTCCATTTCAGGTGTCGTGA | |
| 6640 | Leader (aa) | MALPVTALLLPLALLLHAARP | 13 |
| 6641 | Leader (na) | ATGGCCCTGCCTGTGACAGCCCTGCTGCTGCCTCTGGCT | 54 |
| | | CTGCTGCTGCATGCCGCTAGACCC | |
| 10802 | Leader (na) | ATGGCCCTCCCTGTCACCGCCCTGCTGCTTCCGCTGGCT | |
| | | CTTCTGCTCCACGCCGCTCGGCCC | |
| 6642 | CD8 hinge | TTTPAPRPPTPAPTIASQPLSLRPEACRPAAGGAVHTRGLD | 14 |
| | (aa) | FACD | |
| 6643 | CD8 hinge | ACCACGACGCCAGCGCCGCGACCACCAACACCGGCGCC | 55 |
| | (na) | CACCATCGCGTCGCAGCCCCTGTCCCTGCGCCCAGAGG | |
| | | CGTGCCGGCCAGCGGCGGGGGGCGCAGTGCACACGAG | |
| | | GGGGCTGGACTTCGCCTGTGAT | |
| 6630 | Ig4 hinge | ESKYGPPCPPCPAPEFLGGPSVFLFPPKPKDTLMISRTPEVT | 102 |
| | (aa) | CVVVDVSQEDPEVQFNWYVDGVEVHNAKTKPREEQFNS | |
| | | TYRVVSVLTVLHQDWLNGKEYKCKVSNKGLPSSIEKTISK | |
| | | AKGQPREPQVYTLPPSQEEMTKNQVSLTCLVKGFYPSDIA | |
| | | VEWESNGQPENNYKTTPPVLDSDGSFFLYSRLTVDKSRW | |
| | | QEGNVFSCSVMHEALHNHYTQKSLSLSLGKM | |
| 6631 | Ig4 hinge | GAGAGCAAGTACGGCCCTCCCTGCCCCCCTTGCCCTGC | 103 |
| | (na) | CCCCGAGTTCCTGGGCGGACCCAGCGTGTTCCTGTTCCC | |
| | | CCCCAAGCCCAAGGACACCCTGATGATCAGCCGGACCC | |
| | | CCGAGGTGACCTGTGTGGTGGTGGACGTGTCCCAGGAG | |
| | | GACCCCGAGGTCCAGTTCAACTGGTACGTGGACGGCGT | |
| | | GGAGGTGCACAACGCCAAGACCAAGCCCCGGGAGGAG | |
| | | CAGTTCAATAGCACCTACCGGGTGGTGTCCGTGCTGAC | |
| | | CGTGCTGCACCAGGACTGGCTGAACGGCAAGGAATACA | |
| | | AGTGTAAGGTGTCCAACAAGGGCCTGCCCAGCAGCATC | |
| | | GAGAAAACCATCAGCAAGGCCAAGGGCCAGCCTCGGG | |
| | | AGCCCCAGGTGTACACCCTGCCCCCTAGCCAAGAGGAG | |
| | | ATGACCAAGAACCAGGTGTCCCTGACCTGCCTGGTGAA | |
| | | GGGCTTCTACCCCAGCGACATCGCCGTGGAGTGGGAGA | |
| | | GCAACGGCCAGCCCGAGAACAACTACAAGACCACCCCC | |
| | | CCTGTGCTGGACAGCGACGGCAGCTTCTTCCTGTACAG | |
| | | CCGGCTGACCGTGGACAAGAGCCGGTGGCAGGAGGGC | |
| | | AACGTCTTTAGCTGCTCCGTGATGCACGAGGCCCTGCA | |
| | | CAACCACTACACCCAGAAGAGCCTGAGCCTGTCCCTGG | |
| | | GCAAGATG | |
| 6632 | IgD hinge | RWPESPKAQASSVPTAQPQAEGSLAKATTAPATTRNTGR | 47 |
| | (aa) | GGEEKKKEKEKEEQEERETKTPECPSHTQPLGVYLLTPAV | |
| | | QDLWLRDKATFTCFVVGSDLKDAHLTWEVAGKVPTGGV | |
| | | EEGLLERHSNGSQSQHSRLTLPRSLWNAGTSVTCTLNHPS | |
| | | LPPQRLMALREPAAQAPVKLSLNLLASSDPPEAASWLLCE | |
| | | VSGFSPPNILLMWLEDQREVNTSGFAPARPPPQPGSTTFW | |
| | | AWSVLRVPAPPSPQPATYTCVVSHEDSRTLLNASRSLEVS | |
| | | YVTDH | |
| 6633 | IgD hinge | AGGTGGCCCGAAAGTCCCAAGGCCCAGGCATCTAGTGT | 48 |
| | (na) | TCCTACTGCACAGCCCCAGGCAGAAGGCAGCCTAGCCA | |
| | | AAGCTACTACTGCACCTGCCACTACGCGCAATACTGGC | |
| | | CGTGGCGGGGAGGAGAAGAAAAAGGAGAAAGAGAAA | |
| | | GAAGAACAGGAAGAGAGGGAGACCAAGACCCCTGAAT | |
| | | GTCCATCCCATACCCAGCCGCTGGGCGTCTATCTCTTGA | |
| | | CTCCCGCAGTACAGGACTTGTGGCTTAGAGATAAGGCC | |
| | | ACCTTTACATGTTTCGTCGTGGGCTCTGACCTGAAGGAT | |
| | | GCCCATTTGACTTGGGAGGTTGCCGGAAAGGTACCCAC | |
| | | AGGGGGGGTTGAGGAAGGGTTGCTGGAGCGCCATTCCA | |
| | | ATGGCTCTCAGAGCCAGCACTCAAGACTCACCCTTCCG | |
| | | AGATCCCTGTGGAACGCCGGGACCTCTGTCACATGTAC | |
| | | TCTAAATCATCCTAGCCTGCCCCCACAGCGTCTGATGGC | |
| | | CCTTAGAGAGCCAGCCGCCCAGGCACCAGTTAAGCTTA | |
| | | GCCTGAATCTGCTCGCCAGTAGTGATCCCCCAGAGGCC | |
| | | GCCAGCTGGCTCTTATGCGAAGTGTCCGGCTTTAGCCCG | |
| | | CCCAACATCTTGCTCATGTGGCTGGAGGACCAGCGAGA | |
| | | AGTGAACACCAGCGGCTTCGCTCCAGCCCGGCCCCCAC | |
| | | CCCAGCCGGGTTCTACCACATTCTGGGCCTGGAGTGTCT | |
| | | TAAGGGTCCCAGCACCACCTAGCCCCCAGCCAGCCACA | |
| | | TACACCTGTGTTGTGTCCCATGAAGATAGCAGGACCCT | |
| | | GCTAAATGCTTCTAGGAGTCTGGAGGTTTCCTACGTGAC | |
| | | TGACCATT | |
| 6634 | GS | GGGGSGGGGS | 49 |
| | hinge/linker | | |
| | (aa) | | |
| 6635 | GS | GGTGGCGGAGGTTCTGGAGGTGGAGGTTCC | 50 |
| | hinge/linker | | |
| | (na) | | |
| 6644 | CD8TM (aa) | IYIWAPLAGTCGVLLLSLVITLYC | 15 |
| 6645 | CD8 TM | ATCTACATCTGGGCGCCCTTGGCCGGGACTTGTGGGGT | 56 |
| | (na) | CCTTCTCCTGTCACTGGTTATCACCCTTTACTGC | |
| 10803 | CD8 TM | ATCTACATTTGGGCCCCTCTGGCTGGTACTTGCGGGGTC | |
| | (na) | CTGCTGCTTTCACTCGTGATCACTCTTTACTGT | |
| 6646 | 4-1BB | KRGRKKLLYIFKQPFMRPVQTTQEEDGCSCRFPEEEEGGC | 16 |
| | intracellular | EL | |
| | domain (aa) | | |
| 6647 | 4-1BB | AAACGGGGCAGAAAGAAACTCCTGTATATATTCAAACA | 60 |
| | intracellular | ACCATTTATGAGACCAGTACAAACTACTCAAGAGGAAG | |
| | domain (na) | ATGGCTGTAGCTGCCGATTTCCAGAAGAAGAAGAAGGA | |
| | | GGATGTGAACTG | |
| 10804 | 4-1BB | AAGCGCGGTCGGAAGAAGCTGCTGTACATCTTTAAGCA | |
| | intracellular | ACCCTTCATGAGGCCTGTGCAGACTACTCAAGAGGAGG | |
| | domain (na) | ACGGCTGTTCATGCCGGTTCCCAGAGGAGGAGGAAGGC | |
| | | GGCTGCGAACTG | |
| 6636 | CD27 (aa) | QRRKYRSNKGESPVEPAEPCRYSCPREEEGSTIPIQEDYRK | 51 |
| | | PEPACSP | |
| 6637 | CD27 (na) | AGGAGTAAGAGGAGCAGGCTCCTGCACAGTGACTACAT | 52 |
| | | GAACATGACTCCCCGCCGCCCCGGGCCCACCCGCAAGC | |
| | | ATTACCAGCCCTATGCCCCACCACGCGACTTCGCAGCCT | |
| | | ATCGCTCC | |
| 6648 | CD3-zeta | RVKFSRSADAPAYKQGQNQLYNELNLGRREEYDVLDKRR | 17 |
| | (aa) | GRDPEMGGKPRRKNPQEGLYNELQKDKMAEAYSEIGMK | |
| | | GERRRGKGHDGLYQGLSTATKDTYDALHMQALPPR | |
| 6649 | CD3-zeta | AGAGTGAAGTTCAGCAGGAGCGCAGACGCCCCCGCGTA | 101 |
| | (na) | CAAGCAGGGCCAGAACCAGCTCTATAACGAGCTCAATC | |
| | | TAGGACGAAGAGAGGAGTACGATGTTTTGGACAAGAG | |
| | | ACGTGGCCGGGACCCTGAGATGGGGGGAAAGCCGAGA | |
| | | AGGAAGAACCCTCAGGAAGGCCTGTACAATGAACTGCA | |
| | | GAAAGATAAGATGGCGGAGGCCTACAGTGAGATTGGG | |
| | | ATGAAAGGCGAGCGCCGGAGGGGCAAGGGGCACGATG | |
| | | GCCTTTACCAGGGTCTCAGTACAGCCACCAAGGACACC | |
| | | TACGACGCCCTTCACATGCAGGCCCTGCCCCCTCGC | |
| 10805 | CD3-zeta | CGCGTGAAATTCAGCCGCAGCGCAGATGCTCCAGCCTA | |
| | (na) | CAAGCAGGGGCAGAACCAGCTCTACAACGAACTCAATC | |
| | | TTGGTCGGAGAGAGGAGTACGACGTGCTGGACAAGCG | |
| | | GAGAGGACGGGACCCAGAAATGGGCGGGAAGCCGCGC | |
| | | AGAAAGAATCCCCAAGAGGGCCTGTACAACGAGCTCCA | |
| | | AAAGGATAAGATGGCAGAAGCCTATAGCGAGATTGGT | |
| | | ATGAAAGGGGAACGCAGAAGAGGCAAAGGCCACGACG | |
| | | GACTGTACCAGGGACTCAGCACCGCCACCAAGGACACC | |
| | | TATGACGCTCTTCACATGCAGGCCCTGCCGCCTCGG | |
| 6650 | CD3-zeta | RVKFSRSADAPAYQQGQNQLYNELNLGRREEYDVLDKRR | 43 |
| | (aa) | GRDPEMGGKPRRKNPQEGLYNELQKDKMAEAYSEIGMK | |
| | | GERRRGKGHDGLYQGLSTATKDTYDALHMQALPPR | |
| 6651 | CD3-zeta | AGAGTGAAGTTCAGCAGGAGCGCAGACGCCCCCGCGTA | 44 |
| | (na) | CCAGCAGGGCCAG | |
| | | AACCAGCTCTATAACGAGCTCAATCTAGGACGAAGAGA | |
| | | GGAGTACGATGTTT | |
| | | TGGACAAGAGACGTGGCCGGGACCCTGAGATGGGGGG | |
| | | AAAGCCGAGAAGGA | |
| | | AGAACCCTCAGGAAGGCCTGTACAATGAACTGCAGAAA | |
| | | GATAAGATGGCGG | |
| | | AGGCCTACAGTGAGATTGGGATGAAAGGCGAGCGCCG | |
| | | GAGGGGCAAGGGGC | |
| | | ACGATGGCCTTTACCAGGGTCTCAGTACAGCCACCAAG | |
| | | GACACCTACGACGC | |
| | | CCTTCACATGCAGGCCCTGCCCCCTCGC | |
| 6629 | linker | GGGGS | 18 |
| 6635 | linker | GGTGGCGGAGGTTCTGGAGGTGGAGGTTCC | 50 |
| 6652 | PD-1 | Pgwfldspdrpwnpptfspallvvtegdnatftcsfsntsesfvlnwyrmspsnqtdkla | |
| | extracellular | afpedrsqpgqdcrfrvtqlpngrdfhmsvvrarrndsgtylcgaislapkaqikeslrael | |
| | domain (aa) | rvterraevptahpspsprpagqfqtlv | |
| 6653 | PD-1 | Cccggatggtttctggactctccggategcccgtggaatcccccaaccttctcaccggcact | |
| | extracellular | cttggttgtgactgagggcgataatgcgaccttcacgtgctogttctccaacacctccgaatca | |
| | domain (na) | ttcgtgctgaactggtaccgcatgagcccgtcaaaccagaccgacaagctcgccgcgtttcc | |
| | | ggaagatcggtcgcaaccgggacaggattgtcggttccgcgtgactcaactgccgaatgg | |
| | | cagagacttccacatgagcgtggtccgcgctaggcgaaacgactccgggacctacctgtgc | |
| | | ggagccatctcgctggcgcctaaggcccaaatcaaagagagcttgagggccgaactgaga | |
| | | gtgaccgagcgcagagctgaggtgccaactgcacatccatccccatcgcctcggcctgcg | |
| | | gggcagtttcagaccctggtc | |
| 6654 | PD-1 CAR | Malpvtalllplalllhaarppgwfldspdrpwnpptfspallvvtegdnatftcsfsntses | |
| | (aa) with | fvlnwyrmspsnqtdklaafpedrsqpgqdcrfrvtqlpngrdfhmsvvrarrndsgtyl | |
| | signal | cgaislapkaqikeslraelrvterraevptahpspsprpagqfqtlvtttpaprpptpaptia | |
| | | sqplslrpeacrpaaggavhtrgldfacdiyiwaplagtcgvlllslvitlyckrgrkkllyif | |
| | | kqpfmrpvqttqeedgescrfpeeeeggcelrvkfsrsadapaykqgqnqlynelnlgrr | |
| | | eeydvldkrrgrdpemggkprrknpqeglynelqkdkmaeayseigmkgerrrgkg | |
| | | hdglyqglstatkdtydalhmqalppr | |
| 6655 | PD-1 CAR | Atggccctccctgtcactgccctgcttctccccctegcactcctgctccacgccgctagacc | |
| | (na) | acccggatggtttctggactctccggatcgcccgtggaatcccccaaccttctcaccggcact | |
| | | cttggttgtgactgagggcgataatgcgaccttcacgtgctcgttctccaacacctccgaatca | |
| | | ttcgtgctgaactggtaccgcatgagcccgtcaaaccagaccgacaagctcgccgcgtttcc | |
| | | ggaagatcggtcgcaaccgggacaggattgtcggttccgcgtgactcaactgccgaatgg | |
| | | cagagacttccacatgagcgtggtccgcgctaggcgaaacgactccgggacctacctgtgc | |
| | | ggagccatctcgctggcgcctaaggcccaaatcaaagagagcttgagggccgaactgaga | |
| | | gtgaccgagcgcagagctgaggtgccaactgcacatccatccccatcgcctcggcctgcg | |
| | | gggcagtttcagaccctggtcacgaccactccggcgcegcgcccaccgactccggcccca | |
| | | actatcgcgagccagcccctgtcgctgaggccggaagcatgccgccctgccgccggaggt | |
| | | gctgtgcatacccggggattggacttcgcatgcgacatctacatttgggctcctctcgccgga | |
| | | acttgtggcgtgctccttctgtccctggtcatcaccctgtactgcaagcggggtcggaaaaag | |
| | | cttctgtacattttcaagcagcccttcatgaggcccgtgcaaaccacccaggaggaggacgg | |
| | | ttgctcctgccggttccccgaagaggaagaaggaggttgcgagctgcgcgtgaagttctcc | |
| | | cggagcgccgacgcccccgcctataagcagggccagaaccagctgtacaacgaactgaa | |
| | | cctgggacggcgggaagagtacgatgtgctggacaagcggcgcggccgggaccccgaa | |
| | | atggggggaagcctagaagaaagaaccctcaggaaggcctgtataacgagctgcagaa | |
| | | ggacaagatggccgaggcctactccgaaattgggatgaagggagagcggcggagggga | |
| | | aaggggcacgacggcctgtaccaaggactgtccaccgccaccaaggacacatacgatgc | |
| | | cctgcacatgcaggcccttccccctcgc | |
| 6592 | linker | (Gly-Gly-Gly-Ser)n, where n = 1-10 | 105 |
| 6593 | linker | (Gly4 Ser)4 | 106 |
| 6594 | linker | (Gly4 Ser)3 | 107 |
| 6595 | linker | (Gly3Ser) | 108 |
| 6656 | PD1 CAR | Pgwfldspdrpwnpptfspallvvtegdnatftcsfsntsesfvlnwyrmspsnqtdkla | |
| | (aa) | afpedrsqpgqdcrfrvtqlpngrdfhmsvvrarrndstylcgaislapkagikeslrael | |
| | | rvterraevptahpspsprpagqfqtlvtttpaprpptpaptiasqplslrpeacrpaaggav | |
| | | htrgldfacdiyiwaplagtcgvlllslvitlyckrgrkkllyifkqpfmrpvqttqeedgcs | |
| | | crfpeeeeggcelrvkfsrsadapaykqgqnqlynelnlgrreeydvldkrrgrdpemg | |
| | | gkprrknpqeglynelqkdkmaeayseigmkgerrrgkghdglyqglstatkdtydal | |
| | | hmqalppr | |

### VI. Cells

[1051] In another aspect, the invention provides cells which comprise, or which at any time comprised, a gRNA molecule, e.g., one or more gRNA molecules, as described herein, or a CRISPR system as described herein. In an embodiment, the cell has been altered, e.g., the target sequence targeted by the gRNA molecule has been altered, e.g., to create an indel, by introduction of a gRNA molecule as described herein (or nucleic acid encoding said gRNA molecule), or a CRISPR system (or nucleic acid encoding one or more components of said CRISPR system) as described herein, e.g., altered by a method described herein. In an embodiment, the alteration results in reduced or no expression of the functional (e.g., wild type) gene product of the gene comprising the target site.

[1052] In one aspect, the cell is an animal cell. In embodiments, the cell is a mammalian, primate, or human cell. In embodiments, the cell is a human cell. In embodiments, the cell is an immune effector cell (e.g., a population of immune effector cells), for example a T cell or NK cell. In embodiments, the T cell (e.g., population of T cells) is or comprises a CD4+ T cell, a CD8+ T cell, or a combination thereof. In embodiments, the cell is autologous. In embodiments, the cell is allogeneic.

[1053] In a preferred embodiment the cell (e.g., the population of cells) has been, or will be, engineered to express a chimeric antigen receptor (CAR), e.g., a CAR as described in Section V. In embodiments, the cell is engineered to express a BCMA CAR, e.g., as described herein. In embodiments, the CAR-engineered cell is allogeneic. In embodiments, the CAR-engineered cell is autologous.

[1054] In another aspect, the invention provides cells, such as those described above, which include, has at any time included, or will include a second gRNA molecule as described herein, e.g., a second gRNA molecule with a targeting domain different from that of the first gRNA molecule. In embodiments, the two gRNA molecules are complementary to target sites within the same gene, for example, are complementary to two target sites within the gene for the same allogeneic T cell target, e.g., comprise two target sites within the TRAC gene. Such cells may comprise a large, e.g., 20-60, 20-70, 20-80, 20-90, 20-100, or greater than 1000, greater than 2000, greater than 3000, greater than 4000, greater than 5000, greater than 6000 base pair excision of DNA located between the target sites of the two gRNA molecules, as described herein in Section VIII. Alternatively, the two gRNAs targeting target sequences of the same gene may not lead to an excision, but may instead, for example, create an indel at or near each of the targeted sites. In other embodiments, the two or more gRNA molecules are complementary to target sites within two different genes whose gene products associate to form a molecular complex. An example of such an embodiment is a first gRNA molecule targeting TRAC, and a second gRNA molecule targeting TRBC1 (wherein both the TCR alpha constant chain and the TCR beta constant chain 1 are components of the TCR on the cell surface). Without being bound by theory, introducing CRISPR systems which target two or more target sequences of the same gene, or which target two or more genes of the same molecular complex (e.g., in the case of targeting TRAC and TRBC1) may lead to further reduced or eliminated expression of the target gene product, relative to introducing a CRISPR system which targets only a single target sequence of the target gene.

[1055] It will be understood that in any of the aspects and embodiments of the invention in which two or more target sites of different genes (or different molecular complexes, e.g., when targeting TCR, and B2M) are targeted, that for any or all of the different gene (or molecular complex) targets, two or more gRNAs may be employed with respect to one or more of said different genes or different molecular complexes. For example, in embodiments and aspects in which expression of TCR and expression of B2M is reduced or eliminated, the reduced or eliminated expression of TCR may be accomplished by, for example, one gRNA targeting TRAC, by more than one gRNA molecule targeting TRAC, or by one gRNA molecule targeting TRAC and a second gRNA targeting a different component of the TCR, e.g., TRBC1; while at the same time, or alternatively, targeting of B2M may be accomplished by, for example, one gRNA molecule targeting B2M or by two or more gRNA molecules targeting B2M.

[1056] In other embodiments, the two or more, e.g. two, gRNA molecules are complementary to target sites within different genes. Such cells may comprise alterations, e.g., indels, at or near each target site such that expression of the functional gene product of more than one gene is reduced or eliminated. As discussed above, in such embodiments, more than one gRNA molecule targeted to each of the different genes may be employed.

[1057] In embodiments, the cell comprises, has comprised or will comprise a first gRNA molecule comprising a targeting domain complementary with a target sequence of an allogeneic T-cell target (e.g., a targeting domain described in Tables 1, 3, 4 or 5), and a second gRNA molecule comprising a targeting domain complementary with a target sequence of an inhibitory molecule or downstream effector of signaling through an inhibitory molecule (e.g., comprises a targeting domain described in Table 2 or Table 6). In embodiments, the inhibitory molecule or downstream effector of signaling through an inhibitory molecule is CD274, HAVCR2, LAG3, PDCD1, PD-L2, CTLA4, CEACAM (e.g., CEACAM-1, CEACAM-3 and/or CEACAM-5), VISTA, BTLA, TIGIT, LAIR1, CD160, 2B4, CD80, CD86, B7-H3 (CD113), B7-H4 (VTCN1), HVEM (TNFRSF14 or CD107), KIR, A2aR, MHC class I, MHC class II, GAL9, adenosine, and TGF beta, or PTPN11.

[1058] In embodiments, the cell comprises, has comprised or will comprise a first gRNA molecule comprising a targeting domain complementary with a target sequence of TRAC, TRBC1, TRBC2, CD247, CD3D, CD3 E, or CD3G, and a second gRNA molecule comprising a targeting domain complementary with a target sequence of B2M, NLRC5, HLA-A, HLA-B or HLA-C.

[1059] In embodiments, a cell of the invention comprises, has comprised or will comprise a first gRNA molecule comprising a targeting domain complementary with a target sequence of TRAC, TRBC1, TRBC2, CD247, CD3D, CD3 E, or CD3G; a second gRNA molecule comprising a targeting domain complementary with a target sequence of B2M, NLRC5, HLA-A, HLA-B or HLA-C; and a third gRNA molecule comprising a targeting domain complementary with a target sequence of CIITA. Without being bound by theory, it is believed that reducing or eliminating expression of a MHC class I molecule, e.g., by a method described herein employing a gRNA to B2M or a gRNA to NLRC5, may cause the modified cell to upregulate expression of one or more MHC class II molecules. In such circumstances, in order to create, for example, an allogeneic cell (e.g., an allogeneic T cell, e.g., a CAR-expressing allogeneic T cell described herein) able to avoid a host versus graft disease response, it may be beneficial to reduce or eliminate expression of one or more MHC class II molecules (in addition to the one or more MHC class I molecules), for example, by a method described herein employing a gRNA to CIITA. In one embodiment, the cell, e.g., a CAR-expressing cell, e.g., as described herein, comprises, has comprised or will comprise, a first gRNA to TRAC, e.g., as described herein, a second gRNA to B2M, e.g., as described herein, and a third gRNA to CIITA, e.g., as described herein. In one embodiment, the cell, e.g., a CAR-expressing cell, e.g., as described herein, comprises, has comprised or will comprise, a first gRNA to TRAC, e.g., as described herein, a second gRNA to NLRC5, e.g., as described herein, and a third gRNA to CIITA, e.g., as described herein.

[1060] In embodiments, the invention provides a cell, e.g., a CAR-expressing cell, e.g., as described herein, that comprises one or more modifications (e.g., nucleotide insertions or deletions) to an endogenous gene encoding a component of the TCR, e.g., TRAC or TRBC (e.g., TRBC1 or TRBC2); one or more modifications (e.g., nucleotide insertions or deletions) to an endogenous B2M gene; and/or one or more modifications (e.g., nucleotide insertions or deletions) to an endogenous CIITA gene. In embodiments, said modifications reduce or eliminate expression of said gene. In embodiments, the invention provides a cell, e.g., a CAR-expressing cell, e.g., as described herein, that is TCR− (e.g., has a level of expression of TCR greater than 50%, 60%, 70%, 80%, 90%, 95%, 96%, 97%, 98%, or 99% lower than that of an unmodified cell of the same type, as detected by FACS, e.g., FACS using an anti-CD3 antibody), B2M− (e.g., has a level of expression of B2M and/or one or more MHC class I proteins greater than 50%, 60%, 70%, 80%, 90%, 95%, 96%, 97%, 98%, or 99% lower than that of an unmodified cell of the same type, as detected by FACS, e.g., FACS using an anti-B2M antibody) and/or CIITA−(e.g., has a level of expression of CIITA and/or a MHC class II protein greater than 50%, 60%, 70%, 80%, 90%, 95%, 96%, 97%, 98%, or 99% lower than that of an unmodified cell of the same type, as detected by FACS, e.g., FACS using an anti-CIITA antibody). In an embodiment, the cell is engineered to express a CAR molecule, e.g., as described herein. In embodiments, the CAR is a CD19 CAR, e.g., as described herein. In other embodiments, the CAR is a BCMA CAR, e.g., as described herein. In other embodiments, the CAR is a CD123 CAR, e.g., as described herein.

[1061] In embodiments, the invention provides a cell, e.g., a CAR-expressing cell, e.g., as described herein, that comprises one or more modifications (e.g., nucleotide insertions or deletions) to an endogenous gene encoding a component of the TCR, e.g., TRAC or TRBC (e.g., TRBC1 or TRBC2); one or more modifications (e.g., nucleotide insertions or deletions) to an endogenous NLRC5 gene; and/or one or more modifications (e.g., nucleotide insertions or deletions) to an endogenous CIITA gene. In embodiments, said modifications reduce or eliminate expression of said gene. In embodiments, the invention provides a cell, e.g., a CAR-expressing cell, e.g., as described herein, that is TCR− (e.g., has a level of expression of TCR greater than 50%, 60%, 70%, 80%, 90%, 95%, 96%, 97%, 98%, or 99% lower than that of an unmodified cell of the same type, as detected by FACS, e.g., FACS using an anti-CD3 antibody), NLRC5—(e.g., has a level of expression of NLRC5 and/or one or more MHC class I proteins greater than 50%, 60%, 70%, 80%, 90%, 95%, 96%, 97%, 98%, or 99% lower than that of an unmodified cell of the same type, as detected by FACS, e.g., FACS using an anti-NLRC5 antibody) and/or CIITA− (e.g., has a level of expression of CIITA and/or a MHC class II protein greater than 50%, 60%, 70%, 80%, 90%, 95%, 96%, 97%, 98%, or 99% lower than that of an unmodified cell of the same type, as detected by FACS, e.g., FACS using an anti-CIITA antibody). In an embodiment, the cell is engineered to express a CAR molecule, e.g., as described herein. In embodiments, the CAR is a CD19 CAR, e.g., as described herein. In other embodiments, the CAR is a BCMA CAR, e.g., as described herein. In other embodiments, the CAR is a CD123 CAR, e.g., as described herein.

[1062] In embodiments, the cell comprises, has comprised or will comprise a first gRNA molecule comprising a targeting domain complementary with a target sequence of TRAC, TRBC1, TRBC2, CD247, CD3D, CD3 E, or CD3G, and a second gRNA molecule comprises a targeting domain complementary with a target sequence of NR3C1, DCK, CD52 or FKBP1A.

[1063] In embodiments, the cell comprises, has comprised or will comprise a first gRNA molecule and a second gRNA molecule, wherein: (1) the first gRNA molecule comprises a targeting domain selected from the group consisting of SEQ ID NO: 5528 to SEQ ID NO: 5623 or SEQ ID NO: 5816 to SEQ ID NO: 5965, and the second guide RNA molecule comprises a targeting domain selected from the group consisting of SEQ ID NO: 1 to SEQ ID NO: 83 and SEQ ID NO: 5492 to SEQ ID NO: 5527; (2) the first gRNA molecule comprises a targeting domain selected from the group consisting of SEQ ID NO: 5528 to SEQ ID NO: 5623 or SEQ ID NO: 5816 to SEQ ID NO: 5965, and the second guide RNA molecule comprises a targeting domain selected from the group consisting of SEQ ID NO: 969 to SEQ ID NO: 1345; (3) the first gRNA molecule comprises a targeting domain selected from the group consisting of SEQ ID NO: 5528 to SEQ ID NO: 5623 or SEQ ID NO: 5816 to SEQ ID NO: 5965, and the second guide RNA molecule comprises a targeting domain selected from the group consisting of SEQ ID NO: 1346 to SEQ ID NO: 1698; (4) the first gRNA molecule comprises a targeting domain selected from the group consisting of SEQ ID NO: 5528 to SEQ ID NO: 5623 or SEQ ID NO: 5816 to SEQ ID NO: 5965, and the second guide RNA molecule comprises a targeting domain selected from the group consisting of SEQ ID NO: 1699 to SEQ ID NO: 2068; (5) the first gRNA molecule comprises a targeting domain selected from the group consisting of SEQ ID NO: 5528 to SEQ ID NO: 5623 or SEQ ID NO: 5816 to SEQ ID NO: 5965, and the second guide RNA molecule comprises a targeting domain selected from the group consisting of SEQ ID NO: 2069 to SEQ ID NO: 2941; (6) the first gRNA molecule comprises a targeting domain selected from the group consisting of SEQ ID NO: 5528 to SEQ ID NO: 5623 or SEQ ID NO: 5816 to SEQ ID NO: 5965, and the second guide RNA molecule comprises a targeting domain selected from the group consisting of SEQ ID NO: 5278 to SEQ ID NO: 5491; (7) the first gRNA molecule comprises a targeting domain selected from the group consisting of SEQ ID NO: 5528 to SEQ ID NO: 5623 or SEQ ID NO: 5816 to SEQ ID NO: 5965, and the second guide RNA molecule comprises a targeting domain selected from the group consisting of SEQ ID NO: 6227 to SEQ ID NO: 6324; (8) the first gRNA molecule comprises a targeting domain selected from the group consisting of SEQ ID NO: 5528 to SEQ ID NO: 5623 or SEQ ID NO: 5816 to SEQ ID NO: 5965, and the second guide RNA molecule comprises a targeting domain selected from the group consisting of SEQ ID NO: 6325 to SEQ ID NO: 6583; (9) the first gRNA molecule comprises a targeting domain selected from the group consisting of SEQ ID NO: 5624 to SEQ ID NO: 5643 or SEQ ID NO: 5966 to SEQ ID NO: 6097, and the second guide RNA molecule comprises a targeting domain selected from the group consisting of SEQ ID NO: 1 to SEQ ID NO: 83 and SEQ ID NO: 5492 to SEQ ID NO: 5527; (10) the first gRNA molecule comprises a targeting domain selected from the group consisting of SEQ ID NO: 5624 to SEQ ID NO: 5643 or SEQ ID NO: 5966 to SEQ ID NO: 6097, and the second guide RNA molecule comprises a targeting domain selected from the group consisting of SEQ ID NO: 969 to SEQ ID NO: 1345; (11) the first gRNA molecule comprises a targeting domain selected from the group consisting of SEQ ID NO: 5624 to SEQ ID NO: 5643 or SEQ ID NO: 5966 to SEQ ID NO: 6097, and the second guide RNA molecule comprises a targeting domain selected from the group consisting of SEQ ID NO: 1346 to SEQ ID NO: 1698; (12) the first gRNA molecule comprises a targeting domain selected from the group consisting of SEQ ID NO: 5624 to SEQ ID NO: 5643 or SEQ ID NO: 5966 to SEQ ID NO: 6097, and the second guide RNA molecule comprises a targeting domain selected from the group consisting of SEQ ID NO: 1699 to SEQ ID NO: 2068; (13) the first gRNA molecule comprises a targeting domain selected from the group consisting of SEQ ID NO: 5624 to SEQ ID NO: 5643 or SEQ ID NO: 5966 to SEQ ID NO: 6097, and the second guide RNA molecule comprises a targeting domain selected from the group consisting of SEQ ID NO: 2069 to SEQ ID NO: 2941; (14) the first gRNA molecule comprises a targeting domain selected from the group consisting of SEQ ID NO: 5624 to SEQ ID NO: 5643 or SEQ ID NO: 5966 to SEQ ID NO: 6097, and the second guide RNA molecule comprises a targeting domain selected from the group consisting of SEQ ID NO: 5278 to SEQ ID NO: 5491; (15) the first gRNA molecule comprises a targeting domain selected from the group consisting of SEQ ID NO: 5624 to SEQ ID NO: 5643 or SEQ ID NO: 5966 to SEQ ID NO: 6097, and the second guide RNA molecule comprises a targeting domain selected from the group consisting of SEQ ID NO: 6227 to SEQ ID NO: 6324; (16) the first gRNA molecule comprises a targeting domain selected from the group consisting of SEQ ID NO: 5624 to SEQ ID NO: 5643 or SEQ ID NO: 5966 to SEQ ID NO: 6097, and the second guide RNA molecule comprises a targeting domain selected from the group consisting of SEQ ID NO: 6325 to SEQ ID NO: 6583; (17) the first gRNA molecule comprises a targeting domain selected from the group consisting of SEQ ID NO: 5644 to SEQ ID NO: 5719 or SEQ ID NO: 6098 to SEQ ID NO: 6226, and the second guide RNA molecule comprises a targeting domain selected from the group consisting of SEQ ID NO: 1 to SEQ ID NO: 83 and SEQ ID NO: 5492 to SEQ ID NO: 5527; (18) the first gRNA molecule comprises a targeting domain selected from the group consisting of SEQ ID NO: 5644 to SEQ ID NO: 5719 or SEQ ID NO: 6098 to SEQ ID NO: 6226, and the second guide RNA molecule comprises a targeting domain selected from the group consisting of SEQ ID NO: 969 to SEQ ID NO: 1345; (19) the first gRNA molecule comprises a targeting domain selected from the group consisting of SEQ ID NO: 5644 to SEQ ID NO: 5719 or SEQ ID NO: 6098 to SEQ ID NO: 6226, and the second guide RNA molecule comprises a targeting domain selected from the group consisting of SEQ ID NO: 1346 to SEQ ID NO: 1698; (20) the first gRNA molecule comprises a targeting domain selected from the group consisting of SEQ ID NO: NO: 5644 to SEQ ID NO: NO: 5719 or SEQ ID NO: 6098 to SEQ ID NO: 6226, and the second guide RNA molecule comprises a targeting domain selected from the group consisting of SEQ ID NO: 1699 to SEQ ID NO: 2068; (21) the first gRNA molecule comprises a targeting domain selected from the group consisting of SEQ ID NO: 5644 to SEQ ID NO: 5719 or SEQ ID NO: 6098 to SEQ ID NO: 6226, and the second guide RNA molecule comprises a targeting domain selected from the group consisting of SEQ ID NO: 2069 to SEQ ID NO: 2941; (22) the first gRNA molecule comprises a targeting domain selected from the group consisting of SEQ ID NO: 5644 to SEQ ID NO: 5719 or SEQ ID NO: 6098 to SEQ ID NO: 6226, and the second guide RNA molecule comprises a targeting domain selected from the group consisting of SEQ ID NO: 5278 to SEQ ID NO: 5491; (23) the first gRNA molecule comprises a targeting domain selected from the group consisting of SEQ ID NO: 5644 to SEQ ID NO: 5719 or SEQ ID NO: 6098 to SEQ ID NO: 6226, and the second guide RNA molecule comprises a targeting domain selected from the group consisting of SEQ ID NO: 6227 to SEQ ID NO: 6324; (24) the first gRNA molecule comprises a targeting domain selected from the group consisting of SEQ ID NO: 5644 to SEQ ID NO: 5719 or SEQ ID NO: 6098 to SEQ ID NO: 6226, and the second guide RNA molecule comprises a targeting domain selected from the group consisting of SEQ ID NO: 6325 to SEQ ID NO: 6583; (25) the first gRNA molecule comprises a targeting domain selected from the group consisting of SEQ ID NO: 84 to SEQ ID NO: 392, and the second guide RNA molecule comprises a targeting domain selected from the group consisting of SEQ ID NO: 1 to SEQ ID NO: 83 and SEQ ID NO: 5492 to SEQ ID NO: 5527; (26) the first gRNA molecule comprises a targeting domain selected from the group consisting of SEQ ID NO: 84 to SEQ ID NO: 392, and the second guide RNA molecule comprises a targeting domain selected from the group consisting of SEQ ID NO: 969 to SEQ ID NO: 1345; (27) the first gRNA molecule comprises a targeting domain selected from the group consisting of SEQ ID NO: 84 to SEQ ID NO: 392, and the second guide RNA molecule comprises a targeting domain selected from the group consisting of SEQ ID NO: 1346 to SEQ ID NO: 1698; (28) the first gRNA molecule comprises a targeting domain selected from the group consisting of SEQ ID NO: 84 to SEQ ID NO: 392, and the second guide RNA molecule comprises a targeting domain selected from the group consisting of SEQ ID NO: 1699 to SEQ ID NO: 2068; (29) the first gRNA molecule comprises a targeting domain selected from the group consisting of SEQ ID NO: 84 to SEQ ID NO: 392, and the second guide RNA molecule comprises a targeting domain selected from the group consisting of SEQ ID NO: 2069 to SEQ ID NO: 2941; (30) the first gRNA molecule comprises a targeting domain selected from the group consisting of SEQ ID NO: 84 to SEQ ID NO: 392, and the second guide RNA molecule comprises a targeting domain selected from the group consisting of SEQ ID NO: 5278 to SEQ ID NO: 5491; (31) the first gRNA molecule comprises a targeting domain selected from the group consisting of SEQ ID NO: 84 to SEQ ID NO: 392, and the second guide RNA molecule comprises a targeting domain selected from the group consisting of SEQ ID NO: 6227 to SEQ ID NO: 6324; (32) the first gRNA molecule comprises a targeting domain selected from the group consisting of SEQ ID NO: 84 to SEQ ID NO: 392, and the second guide RNA molecule comprises a targeting domain selected from the group consisting of SEQ ID NO: 6325 to SEQ ID NO: 6583; (33) the first gRNA molecule comprises a targeting domain selected from the group consisting of SEQ ID NO: 393 to SEQ ID NO: 532, and the second guide RNA molecule comprises a targeting domain selected from the group consisting of SEQ ID NO: 1 to SEQ ID NO: 83 and SEQ ID NO: 5492 to SEQ ID NO: 5527; (34) the first gRNA molecule comprises a targeting domain selected from the group consisting of SEQ ID NO: 393 to SEQ ID NO: 532, and the second guide RNA molecule comprises a targeting domain selected from the group consisting of SEQ ID NO: 969 to SEQ ID NO: 1345; (35) the first gRNA molecule comprises a targeting domain selected from the group consisting of SEQ ID NO: 393 to SEQ ID NO: 532, and the second guide RNA molecule comprises a targeting domain selected from the group consisting of SEQ ID NO: 1346 to SEQ ID NO: 1698; (36) the first gRNA molecule comprises a targeting domain selected from the group consisting of SEQ ID NO: 393 to SEQ ID NO: 532, and the second guide RNA molecule comprises a targeting domain selected from the group consisting of SEQ ID NO: 1699 to SEQ ID NO: 2068; (37) the first gRNA molecule comprises a targeting domain selected from the group consisting of SEQ ID NO: 393 to SEQ ID NO: 532, and the second guide RNA molecule comprises a targeting domain selected from the group consisting of SEQ ID NO: 2069 to SEQ ID NO: 2941; (38) the first gRNA molecule comprises a targeting domain selected from the group consisting of SEQ ID NO: 393 to SEQ ID NO: 532, and the second guide RNA molecule comprises a targeting domain selected from the group consisting of SEQ ID NO: 5278 to SEQ ID NO: 5491; (39) the first gRNA molecule comprises a targeting domain selected from the group consisting of SEQ ID NO: 393 to SEQ ID NO: 532, and the second guide RNA molecule comprises a targeting domain selected from the group consisting of SEQ ID NO: 6227 to SEQ ID NO: 6324; (40) the first gRNA molecule comprises a targeting domain selected from the group consisting of SEQ ID NO: 393 to SEQ ID NO: 532, and the second guide RNA molecule comprises a targeting domain selected from the group consisting of SEQ ID NO: 6325 to SEQ ID NO: 6583; (41) the first gRNA molecule comprises a targeting domain selected from the group consisting of SEQ ID NO: 533 to SEQ ID NO: 839, and the second guide RNA molecule comprises a targeting domain selected from the group consisting of SEQ ID NO: 1 to SEQ ID NO: 83 and SEQ ID NO: 5492 to SEQ ID NO: 5527; (42) the first gRNA molecule comprises a targeting domain selected from the group consisting of SEQ ID NO: 533 to SEQ ID NO: 839, and the second guide RNA molecule comprises a targeting domain selected from the group consisting of SEQ ID NO: 969 to SEQ ID NO: 1345; (43) the first gRNA molecule comprises a targeting domain selected from the group consisting of SEQ ID NO: 533 to SEQ ID NO: 839, and the second guide RNA molecule comprises a targeting domain selected from the group consisting of SEQ ID NO: 1346 to SEQ ID NO: 1698; (44) the first gRNA molecule comprises a targeting domain selected from the group consisting of SEQ ID NO: 533 to SEQ ID NO: 839, and the second guide RNA molecule comprises a targeting domain selected from the group consisting of SEQ ID NO: 1699 to SEQ ID NO: 2068; (45) the first gRNA molecule comprises a targeting domain selected from the group consisting of SEQ ID NO: 533 to SEQ ID NO: 839, and the second guide RNA molecule comprises a targeting domain selected from the group consisting of SEQ ID NO: 2069 to SEQ ID NO: 2941; (46) the first gRNA molecule comprises a targeting domain selected from the group consisting of SEQ ID NO: 533 to SEQ ID NO: 839, and the second guide RNA molecule comprises a targeting domain selected from the group consisting of SEQ ID NO: 5278 to SEQ ID NO: 5491; (47) the first gRNA molecule comprises a targeting domain selected from the group consisting of SEQ ID NO: 533 to SEQ ID NO: 839, and the second guide RNA molecule comprises a targeting domain selected from the group consisting of SEQ ID NO: 6227 to SEQ ID NO: 6324; (48) the first gRNA molecule comprises a targeting domain selected from the group consisting of SEQ ID NO: 533 to SEQ ID NO: 839, and the second guide RNA molecule comprises a targeting domain selected from the group consisting of SEQ ID NO: 6325 to SEQ ID NO: 6583; (49) the first gRNA molecule comprises a targeting domain selected from the group consisting of SEQ ID NO: 840 to SEQ ID NO: 968, and the second guide RNA molecule comprises a targeting domain selected from the group consisting of SEQ ID NO: 1 to SEQ ID NO: 83 and SEQ ID NO: 5492 to SEQ ID NO: 5527; (50) the first gRNA molecule comprises a targeting domain selected from the group consisting of SEQ ID NO: 840 to SEQ ID NO: 968, and the second guide RNA molecule comprises a targeting domain selected from the group consisting of SEQ ID NO: 969 to SEQ ID NO: 1345; (51) the first gRNA molecule comprises a targeting domain selected from the group consisting of SEQ ID NO: 840 to SEQ ID NO: 968, and the second guide RNA molecule comprises a targeting domain selected from the group consisting of SEQ ID NO: 1346 to SEQ ID NO: 1698; (52) the first gRNA molecule comprises a targeting domain selected from the group consisting of SEQ ID NO: 840 to SEQ ID NO: 968, and the second guide RNA molecule comprises a targeting domain selected from the group consisting of SEQ ID NO: 1699 to SEQ ID NO: 2068; (53) the first gRNA molecule comprises a targeting domain selected from the group consisting of SEQ ID NO: 840 to SEQ ID NO: 968, and the second guide RNA molecule comprises a targeting domain selected from the group consisting of SEQ ID NO: 2069 to SEQ ID NO: 2941; (54) the first gRNA molecule comprises a targeting domain selected from the group consisting of SEQ ID NO: 840 to SEQ ID NO: 968, and the second guide RNA molecule comprises a targeting domain selected from the group consisting of SEQ ID NO: 5278 to SEQ ID NO: 5491; (55) the first gRNA molecule comprises a targeting domain selected from the group consisting of SEQ ID NO: 840 to SEQ ID NO: 968, and the second guide RNA molecule comprises a targeting domain selected from the group consisting of SEQ ID NO: 6227 to SEQ ID NO: 6324; (55) the first gRNA molecule comprises a targeting domain selected from the group consisting of SEQ ID NO: 840 to SEQ ID NO: 968, and the second guide RNA molecule comprises a targeting domain selected from the group consisting of SEQ ID NO: 6325 to SEQ ID NO: 6583; (56) the first gRNA molecule comprises a targeting domain selected from the group consisting of SEQ ID NO: 5528 to SEQ ID NO: 5623 or SEQ ID NO: 5816 to SEQ ID NO: 5965, and the second guide RNA molecule comprises a targeting domain selected from the group consisting of SEQ ID NO: 2942 to SEQ ID NO: 3270; (57) the first gRNA molecule comprises a targeting domain selected from the group consisting of SEQ ID NO: 5528 to SEQ ID NO: 5623 or SEQ ID NO: 5816 to SEQ ID NO: 5965, and the second guide RNA molecule comprises a targeting domain selected from the group consisting of SEQ ID NO: 3271 to SEQ ID NO: 3541; (58) the first gRNA molecule comprises a targeting domain selected from the group consisting of SEQ ID NO: 5528 to SEQ ID NO: 5623 or SEQ ID NO: 5816 to SEQ ID NO: 5965, and the second guide RNA molecule comprises a targeting domain selected from the group consisting of SEQ ID NO: 3542 to SEQ ID NO: 4032; (59) the first gRNA molecule comprises a targeting domain selected from the group consisting of SEQ ID NO: 5528 to SEQ ID NO: 5623 or SEQ ID NO: 5816 to SEQ ID NO: 5965, and the second guide RNA molecule comprises a targeting domain selected from the group consisting of SEQ ID NO: 4033 to SEQ ID NO: 4589 and SEQ ID NO: 5720 to SEQ ID NO: 5815; (60) the first gRNA molecule comprises a targeting domain selected from the group consisting of SEQ ID NO: 5528 to SEQ ID NO: 5623 or SEQ ID NO: 5816 to SEQ ID NO: 5965, and the second guide RNA molecule comprises a targeting domain selected from the group consisting of SEQ ID NO: 4590 to SEQ ID NO: 5277; (61) the first gRNA molecule comprises a targeting domain selected from the group consisting of SEQ ID NO: 5624 to SEQ ID NO: 5643 or SEQ ID NO: 5966 to SEQ ID NO: 6097, and the second guide RNA molecule comprises a targeting domain selected from the group consisting of SEQ ID NO: 2942 to SEQ ID NO: 3270; (62) the first gRNA molecule comprises a targeting domain selected from the group consisting of SEQ ID NO: 5624 to SEQ ID NO: 5643 or SEQ ID NO: 5966 to SEQ ID NO: 6097, and the second guide RNA molecule comprises a targeting domain selected from the group consisting of SEQ ID NO: 3271 to SEQ ID NO: 3541; (63) the first gRNA molecule comprises a targeting domain selected from the group consisting of SEQ ID NO: 5624 to SEQ ID NO: 5643 or SEQ ID NO: 5966 to SEQ ID NO: 6097, and the second guide RNA molecule comprises a targeting domain selected from the group consisting of SEQ ID NO: 3542 to SEQ ID NO: 4032; (64) the first gRNA molecule comprises a targeting domain selected from the group consisting of SEQ ID NO: 5624 to SEQ ID NO: 5643 or SEQ ID NO: 5966 to SEQ ID NO: 6097, and the second guide RNA molecule comprises a targeting domain selected from the group consisting of SEQ ID NO: 4033 to SEQ ID NO: 4589 and SEQ ID NO: 5720 to SEQ ID NO: 5815; (65) the first gRNA molecule comprises a targeting domain selected from the group consisting of SEQ ID NO: 5624 to SEQ ID NO: 5643 or SEQ ID NO: 5966 to SEQ ID NO: 6097, and the second guide RNA molecule comprises a targeting domain selected from the group consisting of SEQ ID NO: 4590 to SEQ ID NO: 5277; (66) the first gRNA molecule comprises a targeting domain selected from the group consisting of SEQ ID NO: 5644 to SEQ ID NO: 5719 or SEQ ID NO: 6098 to SEQ ID NO: 6226, and the second guide RNA molecule comprises a targeting domain selected from the group consisting of SEQ ID NO: 2942 to SEQ ID NO: 3270; (67) the first gRNA molecule comprises a targeting domain selected from the group consisting of SEQ ID NO: 5644 to SEQ ID NO: 5719 or SEQ ID NO: 6098 to SEQ ID NO: 6226, and the second guide RNA molecule comprises a targeting domain selected from the group consisting of SEQ ID NO: 3271 to SEQ ID NO: 3541; (68) the first gRNA molecule comprises a targeting domain selected from the group consisting of SEQ ID NO: 5644 to SEQ ID NO: 5719 or SEQ ID NO: 6098 to SEQ ID NO: 6226, and the second guide RNA molecule comprises a targeting domain selected from the group consisting of SEQ ID NO: 3542 to SEQ ID NO: 4032; (69) the first gRNA molecule comprises a targeting domain selected from the group consisting of SEQ ID NO: 5644 to SEQ ID NO: 5719 or SEQ ID NO: 6098 to SEQ ID NO: 6226, and the second guide RNA molecule comprises a targeting domain selected from the group consisting of SEQ ID NO: 4033 to SEQ ID NO: 4589 and SEQ ID NO: 5720 to SEQ ID NO: 5815; (70) the first gRNA molecule comprises a targeting domain selected from the group consisting of SEQ ID NO: 5644 to SEQ ID NO: 5719 or SEQ ID NO: 6098 to SEQ ID NO: 6226, and the second guide RNA molecule comprises a targeting domain selected from the group consisting of SEQ ID NO: 4590 to SEQ ID NO: 5277; (71) the first gRNA molecule comprises a targeting domain selected from the group consisting of SEQ ID NO: 84 to SEQ ID NO: 392, and the second guide RNA molecule comprises a targeting domain selected from the group consisting of SEQ ID NO: 2942 to SEQ ID NO: 3270; (72) the first gRNA molecule comprises a targeting domain selected from the group consisting of SEQ ID NO: 84 to SEQ ID NO: 392, and the second guide RNA molecule comprises a targeting domain selected from the group consisting of SEQ ID NO: 3271 to SEQ ID NO: 3541; (73) the first gRNA molecule comprises a targeting domain selected from the group consisting of SEQ ID NO: 84 to SEQ ID NO: 392, and the second guide RNA molecule comprises a targeting domain selected from the group consisting of SEQ ID NO: 3542 to SEQ ID NO: 4032; (74) the first gRNA molecule comprises a targeting domain selected from the group consisting of SEQ ID NO: 84 to SEQ ID NO: 392, and the second guide RNA molecule comprises a targeting domain selected from the group consisting of SEQ ID NO: 4033 to SEQ ID NO: 4589 and SEQ ID NO: 5720 to SEQ ID NO: 5815; (75) the first gRNA molecule comprises a targeting domain selected from the group consisting of SEQ ID NO: 84 to SEQ ID NO: 392, and the second guide RNA molecule comprises a targeting domain selected from the group consisting of SEQ ID NO: 4590 to SEQ ID NO: 5277; (76) the first gRNA molecule comprises a targeting domain selected from the group consisting of SEQ ID NO: 393 to SEQ ID NO: 532, and the second guide RNA molecule comprises a targeting domain selected from the group consisting of SEQ ID NO: 2942 to SEQ ID NO: 3270; (77) the first gRNA molecule comprises a targeting domain selected from the group consisting of SEQ ID NO: 393 to SEQ ID NO: 532, and the second guide RNA molecule comprises a targeting domain selected from the group consisting of SEQ ID NO: 3271 to SEQ ID NO: 3541; (78) the first gRNA molecule comprises a targeting domain selected from the group consisting of SEQ ID NO: 393 to SEQ ID NO: 532, and the second guide RNA molecule comprises a targeting domain selected from the group consisting of SEQ ID NO: 3542 to SEQ ID NO: 4032; (79) the first gRNA molecule comprises a targeting domain selected from the group consisting of SEQ ID NO: 393 to SEQ ID NO: 532, and the second guide RNA molecule comprises a targeting domain selected from the group consisting of SEQ ID NO: 4033 to SEQ ID NO: 4589 and SEQ ID NO: 5720 to SEQ ID NO: 5815; (80) the first gRNA molecule comprises a targeting domain selected from the group consisting of SEQ ID NO: 393 to SEQ ID NO: 532, and the second guide RNA molecule comprises a targeting domain selected from the group consisting of SEQ ID NO: 4590 to SEQ ID NO: 5277; (81) the first gRNA molecule comprises a targeting domain selected from the group consisting of SEQ ID NO: 533 to SEQ ID NO: 839, and the second guide RNA molecule comprises a targeting domain selected from the group consisting of SEQ ID NO: 2942 to SEQ ID NO: 3270; (82) the first gRNA molecule comprises a targeting domain selected from the group consisting of SEQ ID NO: 533 to SEQ ID NO: 839, and the second guide RNA molecule comprises a targeting domain selected from the group consisting of SEQ ID NO: 3271 to SEQ ID NO: 3541; (83) the first gRNA molecule comprises a targeting domain selected from the group consisting of SEQ ID NO: 533 to SEQ ID NO: 839, and the second guide RNA molecule comprises a targeting domain selected from the group consisting of SEQ ID NO: 3542 to SEQ ID NO: 4032; (85) the first gRNA molecule comprises a targeting domain selected from the group consisting of SEQ ID NO: 533 to SEQ ID NO: 839, and the second guide RNA molecule comprises a targeting domain selected from the group consisting of SEQ ID NO: 4033 to SEQ ID NO: 4589 and SEQ ID NO: 5720 to SEQ ID NO: 5815; (86) the first gRNA molecule comprises a targeting domain selected from the group consisting of SEQ ID NO: 533 to SEQ ID NO: 839, and the second guide RNA molecule comprises a targeting domain selected from the group consisting of SEQ ID NO: 4590 to SEQ ID NO: 5277; (87) the first gRNA molecule comprises a targeting domain selected from the group consisting of SEQ ID NO: 840 to SEQ ID NO: 968, and the second guide RNA molecule comprises a targeting domain selected from the group consisting of SEQ ID NO: 2942 to SEQ ID NO: 3270; (88) the first gRNA molecule comprises a targeting domain selected from the group consisting of SEQ ID NO: 840 to SEQ ID NO: 968, and the second guide RNA molecule comprises a targeting domain selected from the group consisting of SEQ ID NO: 3271 to SEQ ID NO: 3541; (89) the first gRNA molecule comprises a targeting domain selected from the group consisting of SEQ ID NO: 840 to SEQ ID NO: 968, and the second guide RNA molecule comprises a targeting domain selected from the group consisting of SEQ ID NO: 3542 to SEQ ID NO: 4032; (90) the first gRNA molecule comprises a targeting domain selected from the group consisting of SEQ ID NO: 840 to SEQ ID NO: 968, and the second guide RNA molecule comprises a targeting domain selected from the group consisting of SEQ ID NO: 4033 to SEQ ID NO: 4589 and SEQ ID NO: 5720 to SEQ ID NO: 5815; or (91) the first gRNA molecule comprises a targeting domain selected from the group consisting of SEQ ID NO: 840 to SEQ ID NO: 968, and the second guide RNA molecule comprises a targeting domain selected from the group consisting of SEQ ID NO: 4590 to SEQ ID NO: 5277.

[1064] In an embodiment, the cell comprises, has comprised or will comprise a first gRNA molecule comprising a targeting domain comprising, e.g., consisting of, SEQ ID NO: 5569 or 5586, and a second gRNA molecule comprising a targeting domain comprising, e.g., consisting of, SEQ ID NO: 5775. Said cell preferably comprises an alteration to both TRAC and PDCD1, such that expression of functional TCR and expression of functional PD-1 is reduced or eliminated. In an embodiment, the cell is an immune effector cell, e.g., a T cell or NK cell. In an embodiment, the cell is allogeneic. In an embodiment, the cell is autologous. In an embodiment, the cell is or will be further engineered to express a CAR as described herein.

[1065] In embodiments of the invention, a cell of the invention comprises, has comprised or will comprise a first gRNA molecule comprising a targeting domain complementary to a target sequence of a component of the T cell receptor (e.g., TRAC); a second gRNA molecule comprising a targeting domain complementary to a target sequence of B2M; and a third gRNA molecule comprising a targeting domain complementary to a target sequence of CIITA. Said cell preferably comprises a modification at or near the target sequence of said first gRNA, said second gRNA, and said third gRNA molecules, such that expression of functional TCR, expression of functional B2M and expression of functional CIITA is reduced or eliminated. In an embodiment, the cell is an immune effector cell, e.g., a T cell or NK cell. In an embodiment, the cell is allogeneic. In an embodiment, the cell is autologous. In an embodiment, the cell is or will be further engineered to express a CAR as described herein.

[1066] In an aspect, a cell of the invention comprises (e.g., a population of cells of the invention comprises one or more cells which comprise):
[1067] (a) Nucleic acid sequence encoding a CAR, e.g., as described herein;
[1068] (b) Nucleic acid sequence encoding an NK inhibitory molecule, e.g., as described herein, e.g., nucleic acid encoding an HLA-G or HLA-G:B2M fusion as described herein;
[1069] (c) An indel at or near a sequence of a gene encoding a component of a TCR (e.g., TRAC, TRBC1 or TRBC2, e.g. TRAC) or its regulatory elements, e.g., an indel at or near a target sequence of a gRNA comprising a targeting domain to a component of a TCR (e.g., TRAC, TRBC1 or TRBC2, e.g. TRAC), e.g., comprising a targeting domain listed in Table 1, Table 4 or Table 5;
[1070] (d) An indel at or near a sequence of the gene encoding B2M or its regulatory elements, e.g., an indel at or near a target sequence of a gRNA comprising a targeting domain to B2M, e.g., comprising a targeting domain listed in Table 1 or Table 3;
[1071] (e) Optionally, an indel at or near a sequence of the gene encoding CIITA or its regulatory elements, e.g., an indel at or near a target sequence of a gRNA comprising a targeting domain to CIITA, e.g., comprising a targeting domain listed in Table 1 or Table 6c; and
[1072] (f) Optionally, an indel at or near a sequence of the gene encoding LILRB1 or its regulatory elements, e.g., an indel at or near a target sequence of a gRNA comprising a targeting domain to LILRB1, e.g., comprising a targeting domain listed in Table 6d;

[1073] Wherein the cell (or population of cells comprises one or more cells which) expresses the CAR and the NK inhibitory molecule, and exhibits reduced or eliminated expression and/or function of one or more of: i) a component of a TCR (e.g., TRAC, TRBC1 or TRBC2, e.g. TRAC), ii) B2M, iii) CIITA, and/or iv) LILRB1. In embodiments the indels are

[1074] In an aspect, a cell of the invention comprises (e.g., a population of cells of the invention comprises one or more cells which comprise):
[1075] (a) Nucleic acid sequence encoding a CAR, e.g., as described herein;
[1076] (b) Nucleic acid sequence encoding an NK inhibitory molecule, e.g., as described herein, e.g., nucleic acid encoding an HLA-G as described herein;
[1077] (c) An indel at or near a sequence of a gene encoding a component of a TCR (e.g., TRAC, TRBC1 or TRBC2, e.g. TRAC) or its regulatory elements, e.g., an indel at or near a target sequence of a gRNA comprising a targeting domain to a component of a TCR (e.g., TRAC, TRBC1 or TRBC2, e.g. TRAC), e.g., comprising a targeting domain listed in Table 1, Table 4 or Table 5;
[1078] (d) An indel at or near a sequence of the gene encoding NLRC5 or its regulatory elements, e.g., an indel at or near a target sequence of a gRNA comprising a targeting domain to NLRC5, e.g., comprising a targeting domain listed in Table 1;
[1079] (e) Optionally, an indel at or near a sequence of the gene encoding CIITA or its regulatory elements, e.g., an indel at or near a target sequence of a gRNA comprising a targeting domain to CIITA, e.g., comprising a targeting domain listed in Table 1 or Table 6c; and
[1080] (f) Optionally, an indel at or near a sequence of the gene encoding LILRB1 or its regulatory elements, e.g., an indel at or near a target sequence of a gRNA comprising a targeting domain to LILRB1, e.g., comprising a targeting domain listed in Table 6d;

[1081] Wherein the cell (or population of cells comprises one or more cells which) expresses the CAR and the NK inhibitory molecule, and exhibits reduced or eliminated expression and/or function of one or more of: i) a component of a TCR (e.g., TRAC, TRBC1 or TRBC2, e.g. TRAC), ii) B2M, iii) NLRC5, and/or iv) LILRB1.

[1082] In an aspect, a cell of the invention comprises (e.g., a population of cells of the invention comprises one or more cells which comprise):
[1083] (a) Nucleic acid sequence encoding a CAR, e.g., as described herein;
[1084] (b) An indel at or near a sequence of a gene encoding a component of a TCR (e.g., TRAC, TRBC1 or TRBC2, e.g. TRAC) or its regulatory elements, e.g., an indel at or near a target sequence of a gRNA comprising a targeting domain to a component of a TCR (e.g., TRAC, TRBC1 or TRBC2, e.g. TRAC), e.g., comprising a targeting domain listed in Table 1, Table 4 or Table 5; and
[1085] (c) An indel at or near a sequence of the gene encoding FKBP1A or its regulatory elements, e.g., an indel at or near a target sequence of a gRNA comprising a targeting domain to FKBP1A, e.g., comprising a targeting domain listed in Table 1 or Table 6b;

[1086] Wherein the cell (or population of cells comprises one or more cells which) expresses the CAR, and exhibits reduced or eliminated expression and/or function of one or more of: i) a component of a TCR (e.g., TRAC, TRBC1 or TRBC2, e.g. TRAC), and/or ii) FKBP12. Such cells (or population of cells comprising said cells) are particularly useful, for example, in methods of treatment which comprise administering an immunosuppressant (e.g., cyclosporine, rapamycin or rapalog, or mTor inhibitor, e.g., RAD001).

[1087] In an aspect, a cell of the invention comprises (e.g., a population of cells of the invention comprises one or more cells which comprise):
[1088] (a) Nucleic acid sequence encoding a CAR, e.g., as described herein;
[1089] (b) Nucleic acid sequence encoding a rapamycin-resistant mTor, e.g., as described herein, e.g., nucleic acid sequence encoding an mTor comprising a S2035 mutation, e.g., an S2035I mutation; and;
[1090] (c) An indel at or near a sequence of a gene encoding a component of a TCR (e.g., TRAC, TRBC1 or TRBC2, e.g. TRAC) or its regulatory elements, e.g., an indel at or near a target sequence of a gRNA comprising a targeting domain to a component of a TCR (e.g., TRAC, TRBC1 or TRBC2, e.g. TRAC), e.g., comprising a targeting domain listed in Table 1, Table 4 or Table 5;

[1091] Wherein the cell (or population of cells comprises one or more cells which) expresses the CAR and the rapamycin-resistant mTor, and exhibits reduced or eliminated expression and/or function of a component of a TCR (e.g., TRAC, TRBC1 or TRBC2, e.g. TRAC). Such cells (or population of cells comprising said cells) are particularly useful, for example, in methods of treatment which comprise administering an immunosuppressant (e.g., cyclosporine, rapamycin or rapalog, or mTor inhibitor, e.g., RAD001).

[1092] In any of the aforementioned embodiments and aspects the cell comprises one or more CRISPR systems, e.g., as described herein, comprising the gRNA molecule(s) indicated. In embodiments, the cell comprises one or more ribonuclear protein (RNP) complexes each comprising a Cas9 molecule, e.g., as described herein, and a gRNA molecule comprising the indicated targeting domain, e.g., as described herein. In embodiments, including in any of the methods described herein, where gRNAs to more than one target sequence are employed, the gRNAs (and CRISPR systems comprising said gRNAs) may be introduced into the cell simultaneously. In other embodiments, including in any of the methods described herein, where gRNAs to more than one target sequence are employed, the gRNAs (and CRISPR systems comprising said gRNAs) may be introduced into the cell sequentially.

[1093] In an aspect involving any of the aforementioned embodiments or aspects, the population of cells comprises at least 20%, e.g., at least 30%, at least 40%, at least 50%, at least 60%, at least 70%, at least 80%, at least 90%, at least 95%, or at least 99%, of cells which include an indel at or near each of the target sequences targeted by each of the gRNA molecules. Said population may be obtained, for example, by utilizing high efficiency gRNA molecules (e.g., gRNA molecules which cause an indel in >85% of said cells which are exposed to said gRNA molecule), or by enriching the population for the desired cell, e.g., by selecting for the desired cell population, e.g., by affinity chromatography or cell sorting.

### VII. Template Nucleic Acids (for Introduction of Nucleic Acids)

[1094] The term “template nucleic acid” or “donor template” as used herein refers to a nucleic acid to be inserted at or near a target sequence that has been modified, e.g., cleaved, by a CRISPR system of the present invention. In an embodiment, nucleic acid sequence at or near the target sequence is modified to have some or all of the sequence of the template nucleic acid, typically at or near cleavage site(s). In an embodiment, the template nucleic acid is single stranded. In an alternate embodiment, the template nucleic acid is double stranded. In an embodiment, the template nucleic acid is DNA, e.g., double stranded DNA. In an alternate embodiment, the template nucleic acid is single stranded DNA.

[1095] In embodiments, the template nucleic acid comprises sequence encoding a chimeric antigen receptor (CAR), e.g., a CAR as described above in section V.

[1096] In an embodiment, the template nucleic acid alters the structure of the target position by participating in a homology directed repair event. In an embodiment, the template nucleic acid alters the sequence of the target position. In an embodiment, the template nucleic acid results in the incorporation of a modified, or non-naturally occurring base into the target nucleic acid.

[1097] Mutations in a gene or pathway described herein may be corrected using one of the approaches discussed herein. In an embodiment, a mutation in a gene or pathway described herein is corrected by homology directed repair (HDR) using a template nucleic acid. In an embodiment, a mutation in a gene or pathway described herein is corrected by homologous recombination (HR) using a template nucleic acid. In an embodiment, a mutation in a gene or pathway described herein is corrected by Non-Homologous End Joining (NHEJ) repair using a template nucleic acid. In other embodiments, nucleic acid encoding molecules of interest may be inserted at or near a site modified by a CRISPR system of the present invention. In an embodiment, the nucleic acid inserted encodes a chimeric antigen receptor as described herein. In embodiments, the template nucleic acid comprises regulatory elements, e.g., one or more promotors and/or enhancers, operably linked to the nucleic acid sequence encoding a molecule of interest, e.g., a chimeric antigen receptor, e.g., as described herein.

### HDR Repair and Template Nucleic Acids

[1098] As described herein, nuclease-induced homology directed repair (HDR) can be used to alter a target sequence and correct (e.g., repair or edit) a mutation in the genome. While not wishing to be bound by theory, it is believed that alteration of the target sequence occurs by homology-directed repair (HDR) with a donor template or template nucleic acid. For example, the donor template or the template nucleic acid provides for alteration of the target sequence. It is contemplated that a plasmid donor can be used as a template for homologous recombination. It is further contemplated that a single stranded donor template can be used as a template for alteration of the target sequence by alternate methods of homology directed repair (e.g., single strand annealing) between the target sequence and the donor template. Donor template-effected alteration of a target sequence depends on cleavage by a Cas9 molecule. Cleavage by Cas9 can comprise a double strand break or two single strand breaks.

[1099] In an embodiment, a mutation can be corrected by either a single double-strand break or two single strand breaks. In an embodiment, a mutation can be corrected by (1) a single double-strand break, (2) two single strand breaks, (3) two double stranded breaks with a break occurring on each side of the target sequence, (4) one double stranded breaks and two single strand breaks with the double strand break and two single strand breaks occurring on each side of the target sequence or (5) four single stranded breaks with a pair of single stranded breaks occurring on each side of the target sequence.

### Double Strand Break Mediated Correction

[1100] In an embodiment, double strand cleavage is effected by a Cas9 molecule having cleavage activity associated with an HNH-like domain and cleavage activity associated with a RuvC-like domain, e.g., an N-terminal RuvC-like domain, e.g., a wild type Cas9. Such embodiments require only a single gRNA.

### Single Strand Break Mediated Correction

[1101] In other embodiments, two single strand breaks, or nicks, are effected by a Cas9 molecule having nickase activity, e.g., cleavage activity associated with an HNH-like domain or cleavage activity associated with an N-terminal RuvC-like domain. Such embodiments require two gRNAs, one for placement of each single strand break. In an embodiment, the Cas9 molecule having nickase activity cleaves the strand to which the gRNA hybridizes, but not the strand that is complementary to the strand to which the gRNA hybridizes. In an embodiment, the Cas9 molecule having nickase activity does not cleave the strand to which the gRNA hybridizes, but rather cleaves the strand that is complementary to the strand to which the gRNA hybridizes.

[1102] In an embodiment, the nickase has HNH activity, e.g., a Cas9 molecule having the RuvC activity inactivated, e.g., a Cas9 molecule having a mutation at D10, e.g., the D10A mutation. D10A inactivates RuvC; therefore, the Cas9 nickase has (only) HN H activity and will cut on the strand to which the gRNA hybridizes (e.g., the complementary strand, which does not have the NGG PAM on it). In other embodiments, a Cas9 molecule having an H840, e.g., an H840A, mutation can be used as a nickase. H840A inactivates HNH; therefore, the Cas9 nickase has (only) RuvC activity and cuts on the non-complementary strand (e.g., the strand that has the NGG PAM and whose sequence is identical to the gRNA).

[1103] In an embodiment, in which a nickase and two gRNAs are used to position two single strand nicks, one nick is on the + strand and one nick is on the − strand of the target nucleic acid. The PAMs are outwardly facing. The gRNAs can be selected such that the gRNAs are separated by, from about 0-50, 0-100, or 0-200 nucleotides. In an embodiment, there is no overlap between the target sequence that is complementary to the targeting domains of the two gRNAs. In an embodiment, the gRNAs do not overlap and are separated by as much as 50, 100, or 200 nucleotides. In an embodiment, the use of two gRNAs can increase specificity, e.g., by decreasing off-target binding (Ran el cil., CELL 2013).

[1104] In an embodiment, a single nick can be used to induce HDR. It is contemplated herein that a single nick can be used to increase the ratio of HDR, HR or NHEJ at a given cleavage site.

### Placement of the Double Strand Break or a Single Strand Break Relative to Target Position

[1105] The double strand break or single strand break in one of the strands should be sufficiently close to target position such that correction occurs. In an embodiment, the distance is not more than 50, 100, 200, 300, 350 or 400 nucleotides. While not wishing to be bound by theory, it is believed that the break should be sufficiently close to target position such that the break is within the region that is subject to exonuclease-mediated removal during end resection. If the distance between the target position and a break is too great, the mutation may not be included in the end resection and, therefore, may not be corrected, as donor sequence may only be used to correct sequence within the end resection region.

[1106] In an embodiment, in which a gRNA (unimolecular (or chimeric) or modular gRNA) and Cas9 nuclease induce a double strand break for the purpose of inducing HDR- or HR-mediated correction, the cleavage site is between 0-200 bp (e.g., 0 to 175, 0 to 150, 0 to 125, 0 to 100, 0 to 75, 0 to 50, 0 to 25, 25 to 200, 25 to 175, 25 to 150, 25 to 125, 25 to 100, 25 to 75, 25 to 50, 50 to 200, 50 to 175, 50 to 150, 50 to 125, 50 to 100, 50 to 75, 75 to 200, 75 to 175, 75 to 150, 75 to 125, 75 to 100 bp) away from the target position. In an embodiment, the cleavage site is between 0-100 bp (e.g., 0 to 75, 0 to 50, 0 to 25, 25 to 100, 25 to 75, 25 to 50, 50 to 100, 50 to 75 or 75 to 100 bp) away from the target position.

[1107] In an embodiment, in which two gRNAs (independently, unimolecular (or chimeric) or modular gRNA) complexing with Cas9 nickases induce two single strand breaks for the purpose of inducing HDR-mediated correction, the closer nick is between 0-200 bp (e.g., 0 to 175, 0 to 150, 0 to 125, 0 to 100, 0 to 75, 0 to 50, 0 to 25, 25 to 200, 25 to 175, 25 to 150, 25 to 125, 25 to 100, 25 to 75, 25 to 50, 50 to 200, 50 to 175, 50 to 150, 50 to 125, 50 to 100, 50 to 75, 75 to 200, 75 to 175, 75 to 150, 75 to 125, 75 to 100 bp) away from the target position and the two nicks will ideally be within 25-55 bp of each other (e.g., 25 to 50, 25 to 45, 25 to 40, 25 to 35, 25 to 30, 30 to 55, 30 to 50, 30 to 45, 30 to 40, 30 to 35, 35 to 55, 35 to 50, 35 to 45, 35 to 40, 40 to 55, 40 to 50, 40 to 45 bp) and no more than 100 bp away from each other (e.g., no more than 90, 80, 70, 60, 50, 40, 30, 20, 10 or 5 bp away from each other). In an embodiment, the cleavage site is between 0-100 bp (e.g., 0 to 75, 0 to 50, 0 to 25, 25 to 100, 25 to 75, 25 to 50, 50 to 100, 50 to 75 or 75 to 100 bp) away from the target position.

[1108] In one embodiment, two gRNAs, e.g., independently, unimolecular (or chimeric) or modular gRNA, are configured to position a double-strand break on both sides of a target position. In an alternate embodiment, three gRNAs, e.g., independently, unimolecular (or chimeric) or modular gRNA, are configured to position a double strand break (i.e., one gRNA complexes with a Cas9 nuclease) and two single strand breaks or paired single stranded breaks (i.e., two gRNAs complex with Cas9 nickases) on either side of the target position (e.g., the first gRNA is used to target upstream (i.e., 5′) of the target position and the second gRNA is used to target downstream (i.e., 3′) of the target position). In another embodiment, four gRNAs, e.g., independently, unimolecular (or chimeric) or modular gRNA, are configured to generate two pairs of single stranded breaks (i.e., two pairs of two gRNAs complex with Cas9 nickases) on either side of the target position (e.g., the first gRNA is used to target upstream (i.e., 5′) of the target position and the second gRNA is used to target downstream (i.e., 3′) of the target position). The double strand break(s) or the closer of the two single strand nicks in a pair will ideally be within 0-500 bp of the target position (e.g., no more than 450, 400, 350, 300, 250, 200, 150, 100, 50 or 25 bp from the target position). When nickases are used, the two nicks in a pair are within 25-55 bp of each other (e.g., between 25 to 50, 25 to 45, 25 to 40, 25 to 35, 25 to 30, 50 to 55, 45 to 55, 40 to 55, 35 to 55, 30 to 55, 30 to 50, 35. to 50, 40 to 50, 45 to 50, 35 to 45, or 40 to 45 bp) and no more than 100 bp away from each other (e.g., no more than 90, 80, 70, 60, 50, 40, 30, 20 or 10 bp).

[1109] In one embodiment, two gRNAs, e.g., independently, unimolecular (or chimeric) or modular gRNA, are configured to position a double-strand break on both sides of a target position. In an alternate embodiment, three gRNAs, e.g., independently, unimolecular (or chimeric) or modular gRNA, are configured to position a double strand break (i.e., one gRNA complexes with a Cas9 nuclease) and two single strand breaks or paired single stranded breaks (i.e., two gRNAs complex with Cas9 nickases) on two target sequences (e.g., the first gRNA is used to target an upstream (i.e., 5′) target sequence and the second gRNA is used to target a downstream (i.e., 3′) target sequence of an insertion site. In another embodiment, four gRNAs, e.g., independently, unimolecular (or chimeric) or modular gRNA, are configured to generate two pairs of single stranded breaks (i.e., two pairs of two gRNAs complex with Cas9 nickases) on either side of an insertion site (e.g., the first gRNA is used to target an upstream (i.e., 5′) target sequence described herein, and the second gRNA is used to target a downstream (i.e., 3′) target sequence described herein). The double strand break(s) or the closer of the two single strand nicks in a pair will ideally be within 0-500 bp of the target position (e.g., no more than 450, 400, 350, 300, 250, 200, 150, 100, 50 or 25 bp from the target position). When nickases are used, the two nicks in a pair are within 25-55 bp of each other (e.g., between 25 to 50, 25 to 45, 25 to 40, 25 to 35, 25 to 30, 50 to 55, 45 to 55, 40 to 55, 35 to 55, 30 to 55, 30 to 50, 35 to 50, 40 to 50, 45 to 50, 35 to 45, or 40 to 45 bp) and no more than 100 bp away from each other (e.g., no more than 90, 80, 70, 60, 50, 40, 30, 20 or 10 bp).

### Length of the Homology Arms

[1110] The homology arm should extend at least as far as the region in which end resection may occur, e.g., in order to allow the resected single stranded overhang to find a complementary region within the donor template. The overall length could be limited by parameters such as plasmid size or viral packaging limits. In an embodiment, a homology arm does not extend into repeated elements, e.g., ALU repeats, LINE repeats. A template may have two homology arms of the same or different lengths.

[1111] Exemplary homology arm lengths include at least 25, 50, 100, 250, 500, 750 or 1000 nucleotides.

[1112] Target position, as used herein, refers to a site on a target nucleic acid (e.g., the chromosome) that is modified by a Cas9 molecule-dependent process. For example, the target position can be a modified Cas9 molecule cleavage of the target nucleic acid and template nucleic acid directed modification, e.g., correction, of the target position. In an embodiment, a target position can be a site between two nucleotides, e.g., adjacent nucleotides, on the target nucleic acid into which one or more nucleotides is added. The target position may comprise one or more nucleotides that are altered, e.g., corrected, by a template nucleic acid. In an embodiment, the target position is within a target sequence (e.g., the sequence to which the gRN A binds). In an embodiment, a target position is upstream or downstream of a target sequence (e.g., the sequence to which the gRNA binds).

[1113] Typically, the template sequence undergoes a breakage mediated or catalyzed recombination with the target sequence. In an embodiment, the template nucleic acid includes sequence that corresponds to a site on the target sequence that is cleaved by a Cas9 mediated cleavage event. In an embodiment, the template nucleic acid includes sequence that corresponds to both, a first site on the target sequence that is cleaved in a first Cas9 mediated event, and a second site on the target sequence that is cleaved in a second Cas9 mediated event.

[1114] In an embodiment, the template nucleic acid can include sequence which results in an alteration in the coding sequence of a translated sequence, e.g., one which results in the substitution of one amino acid for another in a protein product, e.g., transforming a mutant allele into a wild type allele, transforming a wild type allele into a mutant allele, and/or introducing a stop codon, insertion of an amino acid residue, deletion of an amino acid residue, or a nonsense mutation.

[1115] In other embodiments, the template nucleic acid can include sequence which results in an alteration in a non-coding sequence, e.g., an alteration in an exon or in a 5′ or 3′ non-translated or non-transcribed region. Such alterations include an alteration in a control element, e.g., a promoter, enhancer, and an alteration in a cis-acting or trans-acting control element.

[1116] The template nucleic acid can include sequence which, when integrated, results in:
[1117] decreasing the activity of a positive control element;
[1118] increasing the activity of a positive control element;
[1119] decreasing the activity of a negative control element;
[1120] increasing the activity of a negative control element;
[1121] decreasing the expression of a gene;
[1122] increasing the expression of a gene;
[1123] increasing resistance to a disorder or disease;
[1124] increasing resistance to viral entry;
[1125] correcting a mutation or altering an unwanted amino acid residue
[1126] conferring, increasing, abolishing or decreasing a biological property of a gene product, e.g., increasing the enzymatic activity of an enzyme, or increasing the ability of a gene product to interact with another molecule.

[1127] The template nucleic acid can include sequence which results in:
[1128] a change in sequence of 1, 2, 3, 4, 5, 6, 7, 8, 9, 10, 11, 12 or more nucleotides of the target sequence.

[1129] In an embodiment, the template nucleic acid is 20+/−10, 30+/−10, 40+/−10, 50+/−10, 60+/−10, 70+/−10, 80+/−10, 90+/−10, 100+/−10, 110+/−10, 120+/−10, 130+/−10, 140+/−10, 150+/−10, 160+/−10, 170+/−10, 1 80+/−10, 190+/−10, 200+/−10, 210+/−10, 220+/−10, 200-300, 300-400, 400-500, 500-600, 600-700, 700-800, 800-900, 900-1000, 1000-2000, 2000-3000 or more than 3000 nucleotides in length.

[1130] A template nucleic acid comprises the following components:

[5′ homology arm]-[insertion sequence]-[3′ homology arm].

[1131] The homology arms provide for recombination into the chromosome, which can replace the undesired element, e.g., a mutation or signature, with the replacement sequence. In an embodiment, the homology arms flank the most distal cleavage sites.

[1132] In an embodiment, the 3′ end of the 5′ homology arm is the position next to the 5′ end of the replacement sequence. In an embodiment, the 5′ homology arm can extend at least 10, 20, 30, 40, 50, 60, 70, 80, 90, 100, 120, 150, 180, 200, 300, 400, 500, 600, 700, 800, 900, 1000, 1500, or 2000 nucleotides 5′ from the 5′ end of the replacement sequence.

[1133] In an embodiment, the 5′ end of the 3′ homology arm is the position next to the 3′ end of the replacement sequence. In an embodiment, the 3′ homology arm can extend at least 10, 20, 30, 40, 50, 60, 70, 80, 90, 100, 120, 150, 180, 200, 300, 400, 500, 600, 700, 800, 900, 1000, 1500, or 2000 nucleotides 3′ from the 3′ end of the replacement sequence.

[1134] It is contemplated herein that one or both homology arms may be shortened to avoid including certain sequence repeat elements, e.g., Alu repeats, LINE elements. For example, a 5′ homology arm may be shortened to avoid a sequence repeat element. In other embodiments, a 3′ homology arm may be shortened to avoid a sequence repeat element. In some embodiments, both the 5′ and the 3′ homology arms may be shortened to avoid including certain sequence repeat elements.

[1135] It is contemplated herein that template nucleic acids for correcting a mutation may designed for use as a single-stranded oligonucleotide (ssODN). When using a ssODN, 5′ and 3′ homology arms may range up to about 200 base pairs (bp) in length, e.g., at least 25, 50, 75, 100, 125, 150, 175, or 200 bp in length. Longer homology arms are also contemplated for ssODNs as improvements in oligonucleotide synthesis continue to be made.

[1136] In one aspect, the insertion sequence comprises nucleic acid sequence that encodes a chimeric antigen receptor, e.g., as described herein. In one embodiment the insertion sequence further comprises a promotor operably linked to the nucleic acid sequence encoding a chimeric antigen receptor, e.g., an EF-1 alpha promoter. In one aspect, the insertion sequence comprises a vector encoding a chimeric antigen receptor, e.g., as described herein, or a portion thereof.

### NHEJ Approaches for Gene Targeting

[1137] As described herein, nuclease-induced non-homologous end-joining (NHEJ) can be used to target gene-specific knockouts. Nuclease-induced NHEJ can also be used to remove (e.g., delete) sequence in a gene of interest.

[1138] While not wishing to be bound by theory, it is believed that, in an embodiment, the genomic alterations associated with the methods described herein rely on nuclease-induced NHEJ and the error-prone nature of the NHEJ repair pathway. NHEJ repairs a double-strand break in the DNA by joining together the two ends; however, generally, the original sequence is restored only if two compatible ends, exactly as they were formed by the double-strand break, are perfectly ligated. The DNA ends of the double-strand break are frequently the subject of enzymatic processing, resulting in the addition or removal of nucleotides, at one or both strands, prior to rejoining of the ends. This results in the presence of insertion and/or deletion (indel) mutations in the DNA sequence at the site of the NHEJ repair. Two-thirds of these mutations may alter the reading frame and, therefore, produce a non-functional protein. Additionally, mutations that maintain the reading frame, but which insert or delete a significant amount of sequence, can destroy functionality of the protein. This is locus dependent as mutations in critical functional domains are likely less tolerable than mutations in non-critical regions of the protein.

[1139] The indel mutations generated by NHEJ are unpredictable in nature; however, at a given break site certain indel sequences are favored and are over represented in the population. The lengths of deletions can vary widely; most commonly in the 1-50 bp range, but they can easily reach greater than 100-200 bp. Insertions tend to be shorter and often include short duplications of the sequence immediately surrounding the break site. However, it is possible to obtain large insertions, and in these cases, the inserted sequence has often been traced to other regions of the genome or to plasmid DNA present in the cells.

[1140] Because NHEJ is a mutagenic process, it can also be used to delete small sequence motifs as long as the generation of a specific final sequence is not required. If a double-strand break is targeted near to a short target sequence, the deletion mutations caused by the NHEJ repair often span, and therefore remove, the unwanted nucleotides. For the deletion of larger DNA segments, introducing two double-strand breaks, one on each side of the sequence, can result in NHEJ between the ends with removal of the entire intervening sequence. Both of these approaches can be used to delete specific DNA sequences; however, the error-prone nature of NHEJ may still produce indel mutations at the site of repair.

[1141] Both double strand cleaving Cas9 molecules and single strand, or nickase, Cas9 molecules can be used in the methods and compositions described herein to generate NHEJ-mediated indels. NHEJ-mediated indels targeted to the gene, e.g., a coding region, e.g., an early coding region of a gene of interest can be used to knockout (i.e., eliminate expression of) a gene of interest. For example, early coding region of a gene of interest includes sequence immediately following a transcription start site, within a first exon of the coding sequence, or within 500 bp of the transcription start site (e.g., less than 500, 450, 400, 350, 300, 250, 200, 150, 100 or 50 bp).

### Placement of Double Strand or Single Strand Breaks Relative to the Target Position

[1142] In an embodiment, in which a gRNA and Cas9 nuclease generate a double strand break for the purpose of inducing NHEJ-mediated indels, a gRNA, e.g., a unimolecular (or chimeric) or modular gRNA molecule, is configured to position one double-strand break in close proximity to a nucleotide of the target position. In an embodiment, the cleavage site is between 0-500 bp away from the target position (e.g., less than 500, 400, 300, 200, 100, 50, 40, 30, 25, 20, 15, 10, 9, 8, 7, 6, 5, 4, 3, 2 or 1 bp from the target position).

[1143] In an embodiment, in which two gRNAs complexing with Cas9 nickases induce two single strand breaks for the purpose of inducing NHEJ-mediated indels, two gRNAs, e.g., independently, unimolecular (or chimeric) or modular gRNA, are configured to position two single-strand breaks to provide for NHEJ repair a nucleotide of the target position. In an embodiment, the gRNAs are configured to position cuts at the same position, or within a few nucleotides of one another, on different strands, essentially mimicking a double strand break. In an embodiment, the closer nick is between 0-30 bp away from the target position (e.g., less than 30, 25, 20, 1, 10, 9, 8, 7, 6, 5, 4, 3, 2 or 1 bp from the target position), and the two nicks are within 25-55 bp of each other (e.g., between 25 to 50, 25 to 45, 25 to 40, 25 to 35, 25 to 30, 50 to 55, 45 to 55, 40 to 55, 35 to 55, 30 to 55, 30 to 50, 35 to 50, 40 to 50, 45 to 50, 35 to 45, or 40 to 45 bp) and no more than 100 bp away from each other (e.g., no more than 90, 80, 70, 60, 50, 40, 30, 20 or 10 bp). In an embodiment, the gRNAs are configured to place a single strand break on either side of a nucleotide of the target position.

[1144] Both double strand cleaving Cas9 molecules and single strand, or nickase, Cas9 molecules can be used in the methods and compositions described herein to generate breaks both sides of a target position. Double strand or paired single strand breaks may be generated on both sides of a target position to remove the nucleic acid sequence between the two cuts (e.g., the region between the two breaks is deleted). In one embodiment, two gRNAs, e.g., independently, unimolecular (or chimeric) or modular gRNA, are configured to position a double-strand break on both sides of a target position (e.g., the first gRNA is used to target upstream (i.e., 5′) of the mutation in a gene or pathway described herein, and the second gRNA is used to target downstream (i.e., 3′) of the mutation in a gene or pathway described herein). In an alternate embodiment, three gRNAs, e.g., independently, unimolecular (or chimeric) or modular gRNA, are configured to position a double strand break (i.e., one gRNA complexes with a Cas9 nuclease) and two single strand breaks or paired single stranded breaks (i.e., two gRNAs complex with Cas9 nickases) on either side of a target position (e.g., the fu st gRNA is used to target upstream (i.e., 5′) of the mutation in a gene or pathway described herein, and the second gRNA is used to target downstream (i.e., 3′) of the mutation in a gene or pathway described herein). In another embodiment, four gRNAs, e.g., independently, unimolecular (or chimeric) or modular gRNA, are configured to generate two pairs of single stranded breaks (i.e., two pairs of two gRNAs complex with Cas9 nickases) on either side of the target position (e.g., the first gRNA is used to target upstream (i.e., 5′) of the mutation in a gene or pathway described herein, and the second gRNA is used to target downstream (i.e., 3′) of the mutation in a gene or pathway described herein). The double strand break(s) or the closer of the two single strand nicks in a pair will ideally be within 0-500 bp of the target position (e.g., no more than 450, 400, 350, 300, 250, 200, 150, 100, 50 or 25 bp from the target position). When nickases are used, the two nicks in a pair are within 25-55 bp of each other (e.g., between 25 to 50, 25 to 45, 25 to 40, 25 to 35, 25 to 30, 50 to 55, 45 to 55, 40 to 55, 35 to 55, 30 to 55, 30 to 50, 35 to 50, 40 to 50, 45 to 50, 35 to 45, or 40 to 45 bp) and no more than 100 bp away from each other (e.g., no more than 90, 80, 70, 60, 50, 40, 30, 20 or 10 bp).

### VIII. Systems Comprising More than One gRNA Molecule

[1145] While not intending to be bound by theory, it has been surprisingly shown herein that the targeting of two target sequences (e.g., by two gRNA molecule/Cas9 molecule complexes which each induce a single- or double-strand break at or near their respective target sequences) located in close proximity on a continuous nucleic acid induces excision (e.g., deletion) of the nucleic acid sequence (or at least 80%, 85%, 90%, 95%, 96%, 97%, 98%, 99% of the nucleic acid sequence) located between the two target sequences. In some aspects, the present disclosure provides for the use of two or more gRNA molecules that comprise targeting domains targeting target sequences in close proximity on a continuous nucleic acid, e.g., a chromosome, e.g., a gene or gene locus, including its introns, exons and regulatory elements. The use may be, for example, by introduction of the two or more gRNA molecules, together with one or more Cas9 molecules (or nucleic acid encoding the two or more gRNA molecules and/or the one or more Cas9 molecules) into a cell.

[1146] In some aspects, the target sequences of the two or more gRNA molecules are located at least 5, 6, 7, 8, 9, 10, 20, 30, 40, 50, 60, 70, 80, 90, 100, 200, 300, 400, 500, 600, 700, 800, 900, 1000, 2000, 3000, 4000, 5000, 6000, or 70000 nucleotides apart on a continuous nucleic acid, but not more than 10000 nucleotides apart on a continuous nucleic acid. In an embodiment, the target sequences are located about 4000 nucleotides apart. In an embodiment, the target sequences are located about 6000 nucleotides apart.

[1147] In some aspects, the plurality of gRNA molecules each target sequences within the same gene or gene locus. In another aspect, the plurality of gRNA molecules each target sequences within 2 or more different genes.

[1148] In some aspects, the invention provides compositions and cells comprising a plurality, for example, 2 or more, for example, 2, gRNA molecules of the invention, wherein the plurality of gRNA molecules target sequences less than 10,000, less than 9,000, less than 8,000, less than 7,000, less than 6,000, less than 5,000, less than 4,000, less than 3,000, less than 2,000, less than 1,000, less than 900, less than 800, less than 700, less than 600, less than 500, less than 400, less than 300, less than 200, less than 100, less than 90, less than 80, less than 70, less than 60, less than 50, less than 40, or less than 30 nucleotides apart. In an embodiment, the target sequences are on the same strand of duplex nucleic acid. In an embodiment, the target sequences are on different strands of duplex nucleic acid.

[1149] In one embodiment, the invention provides a method for excising (e.g., deleting) nucleic acid disposed between two gRNA binding sites disposed less than 10,000, less than 9,000, less than 8,000, less than 7,000, less than 6,000, less than 5,000, less than 4,000, less than 3,000, less than 2,000, less than 1,000, less than 900, less than 800, less than 700, less than 600, less than 500, less than 400, less than 300, less than 200, less than 100, less than 90, less than 80, less than 70, less than 60, less than 50, less than 40, or less than 30 nucleotides apart on the same or different strands of duplex nucleic acid. In an embodiment, the method provides for deletion of more than 50%, more than 60%, more than 70%, more than 80%, more than 85%, more than 86%, more than 87%, more than 88%, more than 89%, more than 90%, more than 91%, more than 92%, more than 93%, more than 94%, more than 95%, more than 96%, more than 97%, more than 98%, more than 99%, or 100% of the nucleotides disposed between the PAM sites associated with each gRNA binding site. In embodiments, the deletion further comprises of one or more nucleotides within one or more of the PAM sites associated with each gRNA binding site. In embodiments, the deletion also comprises one or more nucleotides outside of the region between the PAM sites associated with each gRNA binding site.

[1150] In one aspect, the two or more gRNA molecules comprise targeting domains targeting target sequences flanking a gene regulatory element, e.g., a promotor binding site, an enhancer region, or a repressor region, such that excision of the intervening sequence (or a portion of the intervening sequence) causes up- or down-regulation of a gene of interest.

[1151] In an embodiment, the two or more gRNA molecules are selected from the gRNA molecules of Table 1. In aspects, the two or more gRNA molecules comprise targeting domains that are complementary with sequences in the same gene. In aspects, the two or more gRNA molecules comprise targeting domains that are complementary with sequences of different genes. In an embodiment, the two or more gRNA molecules are selected from the gRNA molecules of Table 2. In aspects, the two or more gRNA molecules comprise targeting domains that are complementary with sequences in the same gene. In aspects, the two or more gRNA molecules comprise targeting domains that are complementary with sequences of different genes. In an embodiment, the two or more gRNA molecules are selected from the gRNA molecules of Table 3. In an embodiment, the two or more gRNA molecules are selected from the gRNA molecules of Table 4. In an embodiment, the two or more gRNA molecules are selected from the gRNA molecules of Table 5. In an embodiment, the two or more gRNA molecules are selected from the gRNA molecules of Table 6. In an embodiment, the first and second gRNA molecules are selected from Tables 1-6, and are selected from different tables, e.g., and comprise targeting domains that are complementary with sequences of different genes. In embodiments, such two or more gRNA molecules may additionally be combined with one or more additional gRNA molecules which are complementary to a target domain of a different gene, as described herein.

[1152] In aspects of the invention that utilize two or more, e.g., two, gRNA molecules, it may be particularly useful for a first gRNA molecule (or more than one gRNA molecules) to comprise a targeting domain specific for a sequence of TRAC and a second gRNA molecule (or more than one gRNA molecules) to comprise a targeting domain specific for a sequence of B2M. In such aspects, it is particularly preferred that the first gRNA molecule to TRAC comprises a targeting domain of any gRNA molecule of FIG. 12, and the second gRNA molecule to B2M comprises a targeting domain of any gRNA molecule of FIG. 14. In an aspect, the first gRNA molecule to TRAC includes a targeting domain comprising, e.g., consisting of, SEQ ID NO: 5569, SEQ ID NO: 5587, SEQ ID NO: 5592 or SEQ ID NO: 5586, and the second gRNA molecule to B2M includes a targeting domain comprising, e.g., consisting of, SEQ ID NO: 5496, SEQ ID NO: 5498, or SEQ ID NO: 5509. In an aspect, the first gRNA molecule and the second gRNA molecule include targeting domains comprising, e.g., consisting of, SEQ ID NO: 5569 and SEQ ID NO: 5519, respectively. In an aspect, the first gRNA molecule and the second gRNA molecule include targeting domains comprising, e.g., consisting of, SEQ ID NO: 5569 and SEQ ID NO: 5497, respectively. In an aspect, the first gRNA molecule and the second gRNA molecule include targeting domains comprising, e.g., consisting of, SEQ ID NO: 5569 and SEQ ID NO: 5499, respectively. In an aspect, the first gRNA molecule and the second gRNA molecule include targeting domains comprising, e.g., consisting of, SEQ ID NO: 5569 and SEQ ID NO: 5498, respectively. In an aspect, the first gRNA molecule and the second gRNA molecule include targeting domains comprising, e.g., consisting of, SEQ ID NO: 5569 and SEQ ID NO: 5503, respectively. In an aspect, the first gRNA molecule and the second gRNA molecule include targeting domains comprising, e.g., consisting of, SEQ ID NO: 5569 and SEQ ID NO: 5496, respectively. In an aspect, the first gRNA molecule and the second gRNA molecule include targeting domains comprising, e.g., consisting of, SEQ ID NO: 5569 and SEQ ID NO: 5507, respectively. In an aspect, the first gRNA molecule and the second gRNA molecule include targeting domains comprising, e.g., consisting of, SEQ ID NO: 5569 and SEQ ID NO: 5515, respectively. In an aspect, the first gRNA molecule and the second gRNA molecule include targeting domains comprising, e.g., consisting of, SEQ ID NO: 5569 and SEQ ID NO: 5493, respectively. In an aspect, the first gRNA molecule and the second gRNA molecule include targeting domains comprising, e.g., consisting of, SEQ ID NO: 5569 and SEQ ID NO: 5506, respectively. In an aspect, the first gRNA molecule and the second gRNA molecule include targeting domains comprising, e.g., consisting of, SEQ ID NO: 5569 and SEQ ID NO: 5509, respectively. In an aspect, the first gRNA molecule and the second gRNA molecule include targeting domains comprising, e.g., consisting of, SEQ ID NO: 5569 and SEQ ID NO: 5517, respectively. In an aspect, the first gRNA molecule and the second gRNA molecule include targeting domains comprising, e.g., consisting of, SEQ ID NO: 5569 and SEQ ID NO: 5521, respectively. In an aspect, the first gRNA molecule and the second gRNA molecule include targeting domains comprising, e.g., consisting of, SEQ ID NO: 5569 and SEQ ID NO: 5520, respectively. In an aspect, the first gRNA molecule and the second gRNA molecule include targeting domains comprising, e.g., consisting of, SEQ ID NO: 5569 and SEQ ID NO: 5500, respectively. In an aspect, the first gRNA molecule and the second gRNA molecule include targeting domains comprising, e.g., consisting of, SEQ ID NO: 5569 and SEQ ID NO: 5494, respectively. In an aspect, the first gRNA molecule and the second gRNA molecule include targeting domains comprising, e.g., consisting of, SEQ ID NO: 5569 and SEQ ID NO: 5508, respectively. In an aspect, the first gRNA molecule and the second gRNA molecule include targeting domains comprising, e.g., consisting of, SEQ ID NO: 5569 and SEQ ID NO: 5514, respectively. In an aspect, the first gRNA molecule and the second gRNA molecule include targeting domains comprising, e.g., consisting of, SEQ ID NO: 5569 and SEQ ID NO: 5492, respectively. In an aspect, the first gRNA molecule and the second gRNA molecule include targeting domains comprising, e.g., consisting of, SEQ ID NO: 5585 and SEQ ID NO: 5519, respectively. In an aspect, the first gRNA molecule and the second gRNA molecule include targeting domains comprising, e.g., consisting of, SEQ ID NO: 5585 and SEQ ID NO: 5497, respectively. In an aspect, the first gRNA molecule and the second gRNA molecule include targeting domains comprising, e.g., consisting of, SEQ ID NO: 5585 and SEQ ID NO: 5499, respectively. In an aspect, the first gRNA molecule and the second gRNA molecule include targeting domains comprising, e.g., consisting of, SEQ ID NO: 5585 and SEQ ID NO: 5498, respectively. In an aspect, the first gRNA molecule and the second gRNA molecule include targeting domains comprising, e.g., consisting of, SEQ ID NO: 5585 and SEQ ID NO: 5503, respectively. In an aspect, the first gRNA molecule and the second gRNA molecule include targeting domains comprising, e.g., consisting of, SEQ ID NO: 5585 and SEQ ID NO: 5496, respectively. In an aspect, the first gRNA molecule and the second gRNA molecule include targeting domains comprising, e.g., consisting of, SEQ ID NO: 5585 and SEQ ID NO: 5507, respectively. In an aspect, the first gRNA molecule and the second gRNA molecule include targeting domains comprising, e.g., consisting of, SEQ ID NO: 5585 and SEQ ID NO: 5515, respectively. In an aspect, the first gRNA molecule and the second gRNA molecule include targeting domains comprising, e.g., consisting of, SEQ ID NO: 5585 and SEQ ID NO: 5493, respectively. In an aspect, the first gRNA molecule and the second gRNA molecule include targeting domains comprising, e.g., consisting of, SEQ ID NO: 5585 and SEQ ID NO: 5506, respectively. In an aspect, the first gRNA molecule and the second gRNA molecule include targeting domains comprising, e.g., consisting of, SEQ ID NO: 5585 and SEQ ID NO: 5509, respectively. In an aspect, the first gRNA molecule and the second gRNA molecule include targeting domains comprising, e.g., consisting of, SEQ ID NO: 5585 and SEQ ID NO: 5517, respectively. In an aspect, the first gRNA molecule and the second gRNA molecule include targeting domains comprising, e.g., consisting of, SEQ ID NO: 5585 and SEQ ID NO: 5521, respectively. In an aspect, the first gRNA molecule and the second gRNA molecule include targeting domains comprising, e.g., consisting of, SEQ ID NO: 5585 and SEQ ID NO: 5520, respectively. In an aspect, the first gRNA molecule and the second gRNA molecule include targeting domains comprising, e.g., consisting of, SEQ ID NO: 5585 and SEQ ID NO: 5500, respectively. In an aspect, the first gRNA molecule and the second gRNA molecule include targeting domains comprising, e.g., consisting of, SEQ ID NO: 5585 and SEQ ID NO: 5494, respectively. In an aspect, the first gRNA molecule and the second gRNA molecule include targeting domains comprising, e.g., consisting of, SEQ ID NO: 5585 and SEQ ID NO: 5508, respectively. In an aspect, the first gRNA molecule and the second gRNA molecule include targeting domains comprising, e.g., consisting of, SEQ ID NO: 5585 and SEQ ID NO: 5514, respectively. In an aspect, the first gRNA molecule and the second gRNA molecule include targeting domains comprising, e.g., consisting of, SEQ ID NO: 5585 and SEQ ID NO: 5492, respectively. In an aspect, the first gRNA molecule and the second gRNA molecule include targeting domains comprising, e.g., consisting of, SEQ ID NO: 5592 and SEQ ID NO: 5519, respectively. In an aspect, the first gRNA molecule and the second gRNA molecule include targeting domains comprising, e.g., consisting of, SEQ ID NO: 5592 and SEQ ID NO: 5497, respectively. In an aspect, the first gRNA molecule and the second gRNA molecule include targeting domains comprising, e.g., consisting of, SEQ ID NO: 5592 and SEQ ID NO: 5499, respectively. In an aspect, the first gRNA molecule and the second gRNA molecule include targeting domains comprising, e.g., consisting of, SEQ ID NO: 5592 and SEQ ID NO: 5498, respectively. In an aspect, the first gRNA molecule and the second gRNA molecule include targeting domains comprising, e.g., consisting of, SEQ ID NO: 5592 and SEQ ID NO: 5503, respectively. In an aspect, the first gRNA molecule and the second gRNA molecule include targeting domains comprising, e.g., consisting of, SEQ ID NO: 5592 and SEQ ID NO: 5496, respectively. In an aspect, the first gRNA molecule and the second gRNA molecule include targeting domains comprising, e.g., consisting of, SEQ ID NO: 5592 and SEQ ID NO: 5507, respectively. In an aspect, the first gRNA molecule and the second gRNA molecule include targeting domains comprising, e.g., consisting of, SEQ ID NO: 5592 and SEQ ID NO: 5515, respectively. In an aspect, the first gRNA molecule and the second gRNA molecule include targeting domains comprising, e.g., consisting of, SEQ ID NO: 5592 and SEQ ID NO: 5493, respectively. In an aspect, the first gRNA molecule and the second gRNA molecule include targeting domains comprising, e.g., consisting of, SEQ ID NO: 5592 and SEQ ID NO: 5506, respectively. In an aspect, the first gRNA molecule and the second gRNA molecule include targeting domains comprising, e.g., consisting of, SEQ ID NO: 5592 and SEQ ID NO: 5509, respectively. In an aspect, the first gRNA molecule and the second gRNA molecule include targeting domains comprising, e.g., consisting of, SEQ ID NO: 5592 and SEQ ID NO: 5517, respectively. In an aspect, the first gRNA molecule and the second gRNA molecule include targeting domains comprising, e.g., consisting of, SEQ ID NO: 5592 and SEQ ID NO: 5521, respectively. In an aspect, the first gRNA molecule and the second gRNA molecule include targeting domains comprising, e.g., consisting of, SEQ ID NO: 5592 and SEQ ID NO: 5520, respectively. In an aspect, the first gRNA molecule and the second gRNA molecule include targeting domains comprising, e.g., consisting of, SEQ ID NO: 5592 and SEQ ID NO: 5500, respectively. In an aspect, the first gRNA molecule and the second gRNA molecule include targeting domains comprising, e.g., consisting of, SEQ ID NO: 5592 and SEQ ID NO: 5494, respectively. In an aspect, the first gRNA molecule and the second gRNA molecule include targeting domains comprising, e.g., consisting of, SEQ ID NO: 5592 and SEQ ID NO: 5508, respectively. In an aspect, the first gRNA molecule and the second gRNA molecule include targeting domains comprising, e.g., consisting of, SEQ ID NO: 5592 and SEQ ID NO: 5514, respectively. In an aspect, the first gRNA molecule and the second gRNA molecule include targeting domains comprising, e.g., consisting of, SEQ ID NO: 5592 and SEQ ID NO: 5492, respectively. In an aspect, the first gRNA molecule and the second gRNA molecule include targeting domains comprising, e.g., consisting of, SEQ ID NO: 5601 and SEQ ID NO: 5519, respectively. In an aspect, the first gRNA molecule and the second gRNA molecule include targeting domains comprising, e.g., consisting of, SEQ ID NO: 5601 and SEQ ID NO: 5497, respectively. In an aspect, the first gRNA molecule and the second gRNA molecule include targeting domains comprising, e.g., consisting of, SEQ ID NO: 5601 and SEQ ID NO: 5499, respectively. In an aspect, the first gRNA molecule and the second gRNA molecule include targeting domains comprising, e.g., consisting of, SEQ ID NO: 5601 and SEQ ID NO: 5498, respectively. In an aspect, the first gRNA molecule and the second gRNA molecule include targeting domains comprising, e.g., consisting of, SEQ ID NO: 5601 and SEQ ID NO: 5503, respectively. In an aspect, the first gRNA molecule and the second gRNA molecule include targeting domains comprising, e.g., consisting of, SEQ ID NO: 5601 and SEQ ID NO: 5496, respectively. In an aspect, the first gRNA molecule and the second gRNA molecule include targeting domains comprising, e.g., consisting of, SEQ ID NO: 5601 and SEQ ID NO: 5507, respectively. In an aspect, the first gRNA molecule and the second gRNA molecule include targeting domains comprising, e.g., consisting of, SEQ ID NO: 5601 and SEQ ID NO: 5515, respectively. In an aspect, the first gRNA molecule and the second gRNA molecule include targeting domains comprising, e.g., consisting of, SEQ ID NO: 5601 and SEQ ID NO: 5493, respectively. In an aspect, the first gRNA molecule and the second gRNA molecule include targeting domains comprising, e.g., consisting of, SEQ ID NO: 5601 and SEQ ID NO: 5506, respectively. In an aspect, the first gRNA molecule and the second gRNA molecule include targeting domains comprising, e.g., consisting of, SEQ ID NO: 5601 and SEQ ID NO: 5509, respectively. In an aspect, the first gRNA molecule and the second gRNA molecule include targeting domains comprising, e.g., consisting of, SEQ ID NO: 5601 and SEQ ID NO: 5517, respectively. In an aspect, the first gRNA molecule and the second gRNA molecule include targeting domains comprising, e.g., consisting of, SEQ ID NO: 5601 and SEQ ID NO: 5521, respectively. In an aspect, the first gRNA molecule and the second gRNA molecule include targeting domains comprising, e.g., consisting of, SEQ ID NO: 5601 and SEQ ID NO: 5520, respectively. In an aspect, the first gRNA molecule and the second gRNA molecule include targeting domains comprising, e.g., consisting of, SEQ ID NO: 5601 and SEQ ID NO: 5500, respectively. In an aspect, the first gRNA molecule and the second gRNA molecule include targeting domains comprising, e.g., consisting of, SEQ ID NO: 5601 and SEQ ID NO: 5494, respectively. In an aspect, the first gRNA molecule and the second gRNA molecule include targeting domains comprising, e.g., consisting of, SEQ ID NO: 5601 and SEQ ID NO: 5508, respectively. In an aspect, the first gRNA molecule and the second gRNA molecule include targeting domains comprising, e.g., consisting of, SEQ ID NO: 5601 and SEQ ID NO: 5514, respectively. In an aspect, the first gRNA molecule and the second gRNA molecule include targeting domains comprising, e.g., consisting of, SEQ ID NO: 5601 and SEQ ID NO: 5492, respectively. In an aspect, the first gRNA molecule and the second gRNA molecule include targeting domains comprising, e.g., consisting of, SEQ ID NO: 5589 and SEQ ID NO: 5519, respectively. In an aspect, the first gRNA molecule and the second gRNA molecule include targeting domains comprising, e.g., consisting of, SEQ ID NO: 5589 and SEQ ID NO: 5497, respectively. In an aspect, the first gRNA molecule and the second gRNA molecule include targeting domains comprising, e.g., consisting of, SEQ ID NO: 5589 and SEQ ID NO: 5499, respectively. In an aspect, the first gRNA molecule and the second gRNA molecule include targeting domains comprising, e.g., consisting of, SEQ ID NO: 5589 and SEQ ID NO: 5498, respectively. In an aspect, the first gRNA molecule and the second gRNA molecule include targeting domains comprising, e.g., consisting of, SEQ ID NO: 5589 and SEQ ID NO: 5503, respectively. In an aspect, the first gRNA molecule and the second gRNA molecule include targeting domains comprising, e.g., consisting of, SEQ ID NO: 5589 and SEQ ID NO: 5496, respectively. In an aspect, the first gRNA molecule and the second gRNA molecule include targeting domains comprising, e.g., consisting of, SEQ ID NO: 5589 and SEQ ID NO: 5507, respectively. In an aspect, the first gRNA molecule and the second gRNA molecule include targeting domains comprising, e.g., consisting of, SEQ ID NO: 5589 and SEQ ID NO: 5515, respectively. In an aspect, the first gRNA molecule and the second gRNA molecule include targeting domains comprising, e.g., consisting of, SEQ ID NO: 5589 and SEQ ID NO: 5493, respectively. In an aspect, the first gRNA molecule and the second gRNA molecule include targeting domains comprising, e.g., consisting of, SEQ ID NO: 5589 and SEQ ID NO: 5506, respectively. In an aspect, the first gRNA molecule and the second gRNA molecule include targeting domains comprising, e.g., consisting of, SEQ ID NO: 5589 and SEQ ID NO: 5509, respectively. In an aspect, the first gRNA molecule and the second gRNA molecule include targeting domains comprising, e.g., consisting of, SEQ ID NO: 5589 and SEQ ID NO: 5517, respectively. In an aspect, the first gRNA molecule and the second gRNA molecule include targeting domains comprising, e.g., consisting of, SEQ ID NO: 5589 and SEQ ID NO: 5521, respectively. In an aspect, the first gRNA molecule and the second gRNA molecule include targeting domains comprising, e.g., consisting of, SEQ ID NO: 5589 and SEQ ID NO: 5520, respectively. In an aspect, the first gRNA molecule and the second gRNA molecule include targeting domains comprising, e.g., consisting of, SEQ ID NO: 5589 and SEQ ID NO: 5500, respectively. In an aspect, the first gRNA molecule and the second gRNA molecule include targeting domains comprising, e.g., consisting of, SEQ ID NO: 5589 and SEQ ID NO: 5494, respectively. In an aspect, the first gRNA molecule and the second gRNA molecule include targeting domains comprising, e.g., consisting of, SEQ ID NO: 5589 and SEQ ID NO: 5508, respectively. In an aspect, the first gRNA molecule and the second gRNA molecule include targeting domains comprising, e.g., consisting of, SEQ ID NO: 5589 and SEQ ID NO: 5514, respectively. In an aspect, the first gRNA molecule and the second gRNA molecule include targeting domains comprising, e.g., consisting of, SEQ ID NO: 5589 and SEQ ID NO: 5492, respectively. In an aspect, the first gRNA molecule and the second gRNA molecule include targeting domains comprising, e.g., consisting of, SEQ ID NO: 5600 and SEQ ID NO: 5519, respectively. In an aspect, the first gRNA molecule and the second gRNA molecule include targeting domains comprising, e.g., consisting of, SEQ ID NO: 5600 and SEQ ID NO: 5497, respectively. In an aspect, the first gRNA molecule and the second gRNA molecule include targeting domains comprising, e.g., consisting of, SEQ ID NO: 5600 and SEQ ID NO: 5499, respectively. In an aspect, the first gRNA molecule and the second gRNA molecule include targeting domains comprising, e.g., consisting of, SEQ ID NO: 5600 and SEQ ID NO: 5498, respectively. In an aspect, the first gRNA molecule and the second gRNA molecule include targeting domains comprising, e.g., consisting of, SEQ ID NO: 5600 and SEQ ID NO: 5503, respectively. In an aspect, the first gRNA molecule and the second gRNA molecule include targeting domains comprising, e.g., consisting of, SEQ ID NO: 5600 and SEQ ID NO: 5496, respectively. In an aspect, the first gRNA molecule and the second gRNA molecule include targeting domains comprising, e.g., consisting of, SEQ ID NO: 5600 and SEQ ID NO: 5507, respectively. In an aspect, the first gRNA molecule and the second gRNA molecule include targeting domains comprising, e.g., consisting of, SEQ ID NO: 5600 and SEQ ID NO: 5515, respectively. In an aspect, the first gRNA molecule and the second gRNA molecule include targeting domains comprising, e.g., consisting of, SEQ ID NO: 5600 and SEQ ID NO: 5493, respectively. In an aspect, the first gRNA molecule and the second gRNA molecule include targeting domains comprising, e.g., consisting of, SEQ ID NO: 5600 and SEQ ID NO: 5506, respectively. In an aspect, the first gRNA molecule and the second gRNA molecule include targeting domains comprising, e.g., consisting of, SEQ ID NO: 5600 and SEQ ID NO: 5509, respectively. In an aspect, the first gRNA molecule and the second gRNA molecule include targeting domains comprising, e.g., consisting of, SEQ ID NO: 5600 and SEQ ID NO: 5517, respectively. In an aspect, the first gRNA molecule and the second gRNA molecule include targeting domains comprising, e.g., consisting of, SEQ ID NO: 5600 and SEQ ID NO: 5521, respectively. In an aspect, the first gRNA molecule and the second gRNA molecule include targeting domains comprising, e.g., consisting of, SEQ ID NO: 5600 and SEQ ID NO: 5520, respectively. In an aspect, the first gRNA molecule and the second gRNA molecule include targeting domains comprising, e.g., consisting of, SEQ ID NO: 5600 and SEQ ID NO: 5500, respectively. In an aspect, the first gRNA molecule and the second gRNA molecule include targeting domains comprising, e.g., consisting of, SEQ ID NO: 5600 and SEQ ID NO: 5494, respectively. In an aspect, the first gRNA molecule and the second gRNA molecule include targeting domains comprising, e.g., consisting of, SEQ ID NO: 5600 and SEQ ID NO: 5508, respectively. In an aspect, the first gRNA molecule and the second gRNA molecule include targeting domains comprising, e.g., consisting of, SEQ ID NO: 5600 and SEQ ID NO: 5514, respectively. In an aspect, the first gRNA molecule and the second gRNA molecule include targeting domains comprising, e.g., consisting of, SEQ ID NO: 5600 and SEQ ID NO: 5492, respectively. In an aspect, the first gRNA molecule and the second gRNA molecule include targeting domains comprising, e.g., consisting of, SEQ ID NO: 5594 and SEQ ID NO: 5519, respectively. In an aspect, the first gRNA molecule and the second gRNA molecule include targeting domains comprising, e.g., consisting of, SEQ ID NO: 5594 and SEQ ID NO: 5497, respectively. In an aspect, the first gRNA molecule and the second gRNA molecule include targeting domains comprising, e.g., consisting of, SEQ ID NO: 5594 and SEQ ID NO: 5499, respectively. In an aspect, the first gRNA molecule and the second gRNA molecule include targeting domains comprising, e.g., consisting of, SEQ ID NO: 5594 and SEQ ID NO: 5498, respectively. In an aspect, the first gRNA molecule and the second gRNA molecule include targeting domains comprising, e.g., consisting of, SEQ ID NO: 5594 and SEQ ID NO: 5503, respectively. In an aspect, the first gRNA molecule and the second gRNA molecule include targeting domains comprising, e.g., consisting of, SEQ ID NO: 5594 and SEQ ID NO: 5496, respectively. In an aspect, the first gRNA molecule and the second gRNA molecule include targeting domains comprising, e.g., consisting of, SEQ ID NO: 5594 and SEQ ID NO: 5507, respectively. In an aspect, the first gRNA molecule and the second gRNA molecule include targeting domains comprising, e.g., consisting of, SEQ ID NO: 5594 and SEQ ID NO: 5515, respectively. In an aspect, the first gRNA molecule and the second gRNA molecule include targeting domains comprising, e.g., consisting of, SEQ ID NO: 5594 and SEQ ID NO: 5493, respectively. In an aspect, the first gRNA molecule and the second gRNA molecule include targeting domains comprising, e.g., consisting of, SEQ ID NO: 5594 and SEQ ID NO: 5506, respectively. In an aspect, the first gRNA molecule and the second gRNA molecule include targeting domains comprising, e.g., consisting of, SEQ ID NO: 5594 and SEQ ID NO: 5509, respectively. In an aspect, the first gRNA molecule and the second gRNA molecule include targeting domains comprising, e.g., consisting of, SEQ ID NO: 5594 and SEQ ID NO: 5517, respectively. In an aspect, the first gRNA molecule and the second gRNA molecule include targeting domains comprising, e.g., consisting of, SEQ ID NO: 5594 and SEQ ID NO: 5521, respectively. In an aspect, the first gRNA molecule and the second gRNA molecule include targeting domains comprising, e.g., consisting of, SEQ ID NO: 5594 and SEQ ID NO: 5520, respectively. In an aspect, the first gRNA molecule and the second gRNA molecule include targeting domains comprising, e.g., consisting of, SEQ ID NO: 5594 and SEQ ID NO: 5500, respectively. In an aspect, the first gRNA molecule and the second gRNA molecule include targeting domains comprising, e.g., consisting of, SEQ ID NO: 5594 and SEQ ID NO: 5494, respectively. In an aspect, the first gRNA molecule and the second gRNA molecule include targeting domains comprising, e.g., consisting of, SEQ ID NO: 5594 and SEQ ID NO: 5508, respectively. In an aspect, the first gRNA molecule and the second gRNA molecule include targeting domains comprising, e.g., consisting of, SEQ ID NO: 5594 and SEQ ID NO: 5514, respectively. In an aspect, the first gRNA molecule and the second gRNA molecule include targeting domains comprising, e.g., consisting of, SEQ ID NO: 5594 and SEQ ID NO: 5492, respectively. In an aspect, the first gRNA molecule and the second gRNA molecule include targeting domains comprising, e.g., consisting of, SEQ ID NO: 5571 and SEQ ID NO: 5519, respectively. In an aspect, the first gRNA molecule and the second gRNA molecule include targeting domains comprising, e.g., consisting of, SEQ ID NO: 5571 and SEQ ID NO: 5497, respectively. In an aspect, the first gRNA molecule and the second gRNA molecule include targeting domains comprising, e.g., consisting of, SEQ ID NO: 5571 and SEQ ID NO: 5499, respectively. In an aspect, the first gRNA molecule and the second gRNA molecule include targeting domains comprising, e.g., consisting of, SEQ ID NO: 5571 and SEQ ID NO: 5498, respectively. In an aspect, the first gRNA molecule and the second gRNA molecule include targeting domains comprising, e.g., consisting of, SEQ ID NO: 5571 and SEQ ID NO: 5503, respectively. In an aspect, the first gRNA molecule and the second gRNA molecule include targeting domains comprising, e.g., consisting of, SEQ ID NO: 5571 and SEQ ID NO: 5496, respectively. In an aspect, the first gRNA molecule and the second gRNA molecule include targeting domains comprising, e.g., consisting of, SEQ ID NO: 5571 and SEQ ID NO: 5507, respectively. In an aspect, the first gRNA molecule and the second gRNA molecule include targeting domains comprising, e.g., consisting of, SEQ ID NO: 5571 and SEQ ID NO: 5515, respectively. In an aspect, the first gRNA molecule and the second gRNA molecule include targeting domains comprising, e.g., consisting of, SEQ ID NO: 5571 and SEQ ID NO: 5493, respectively. In an aspect, the first gRNA molecule and the second gRNA molecule include targeting domains comprising, e.g., consisting of, SEQ ID NO: 5571 and SEQ ID NO: 5506, respectively. In an aspect, the first gRNA molecule and the second gRNA molecule include targeting domains comprising, e.g., consisting of, SEQ ID NO: 5571 and SEQ ID NO: 5509, respectively. In an aspect, the first gRNA molecule and the second gRNA molecule include targeting domains comprising, e.g., consisting of, SEQ ID NO: 5571 and SEQ ID NO: 5517, respectively. In an aspect, the first gRNA molecule and the second gRNA molecule include targeting domains comprising, e.g., consisting of, SEQ ID NO: 5571 and SEQ ID NO: 5521, respectively. In an aspect, the first gRNA molecule and the second gRNA molecule include targeting domains comprising, e.g., consisting of, SEQ ID NO: 5571 and SEQ ID NO: 5520, respectively. In an aspect, the first gRNA molecule and the second gRNA molecule include targeting domains comprising, e.g., consisting of, SEQ ID NO: 5571 and SEQ ID NO: 5500, respectively. In an aspect, the first gRNA molecule and the second gRNA molecule include targeting domains comprising, e.g., consisting of, SEQ ID NO: 5571 and SEQ ID NO: 5494, respectively. In an aspect, the first gRNA molecule and the second gRNA molecule include targeting domains comprising, e.g., consisting of, SEQ ID NO: 5571 and SEQ ID NO: 5508, respectively. In an aspect, the first gRNA molecule and the second gRNA molecule include targeting domains comprising, e.g., consisting of, SEQ ID NO: 5571 and SEQ ID NO: 5514, respectively. In an aspect, the first gRNA molecule and the second gRNA molecule include targeting domains comprising, e.g., consisting of, SEQ ID NO: 5571 and SEQ ID NO: 5492, respectively. In an aspect, the first gRNA molecule and the second gRNA molecule include targeting domains comprising, e.g., consisting of, SEQ ID NO: 5593 and SEQ ID NO: 5519, respectively. In an aspect, the first gRNA molecule and the second gRNA molecule include targeting domains comprising, e.g., consisting of, SEQ ID NO: 5593 and SEQ ID NO: 5497, respectively. In an aspect, the first gRNA molecule and the second gRNA molecule include targeting domains comprising, e.g., consisting of, SEQ ID NO: 5593 and SEQ ID NO: 5499, respectively. In an aspect, the first gRNA molecule and the second gRNA molecule include targeting domains comprising, e.g., consisting of, SEQ ID NO: 5593 and SEQ ID NO: 5498, respectively. In an aspect, the first gRNA molecule and the second gRNA molecule include targeting domains comprising, e.g., consisting of, SEQ ID NO: 5593 and SEQ ID NO: 5503, respectively. In an aspect, the first gRNA molecule and the second gRNA molecule include targeting domains comprising, e.g., consisting of, SEQ ID NO: 5593 and SEQ ID NO: 5496, respectively. In an aspect, the first gRNA molecule and the second gRNA molecule include targeting domains comprising, e.g., consisting of, SEQ ID NO: 5593 and SEQ ID NO: 5507, respectively. In an aspect, the first gRNA molecule and the second gRNA molecule include targeting domains comprising, e.g., consisting of, SEQ ID NO: 5593 and SEQ ID NO: 5515, respectively. In an aspect, the first gRNA molecule and the second gRNA molecule include targeting domains comprising, e.g., consisting of, SEQ ID NO: 5593 and SEQ ID NO: 5493, respectively. In an aspect, the first gRNA molecule and the second gRNA molecule include targeting domains comprising, e.g., consisting of, SEQ ID NO: 5593 and SEQ ID NO: 5506, respectively. In an aspect, the first gRNA molecule and the second gRNA molecule include targeting domains comprising, e.g., consisting of, SEQ ID NO: 5593 and SEQ ID NO: 5509, respectively. In an aspect, the first gRNA molecule and the second gRNA molecule include targeting domains comprising, e.g., consisting of, SEQ ID NO: 5593 and SEQ ID NO: 5517, respectively. In an aspect, the first gRNA molecule and the second gRNA molecule include targeting domains comprising, e.g., consisting of, SEQ ID NO: 5593 and SEQ ID NO: 5521, respectively. In an aspect, the first gRNA molecule and the second gRNA molecule include targeting domains comprising, e.g., consisting of, SEQ ID NO: 5593 and SEQ ID NO: 5520, respectively. In an aspect, the first gRNA molecule and the second gRNA molecule include targeting domains comprising, e.g., consisting of, SEQ ID NO: 5593 and SEQ ID NO: 5500, respectively. In an aspect, the first gRNA molecule and the second gRNA molecule include targeting domains comprising, e.g., consisting of, SEQ ID NO: 5593 and SEQ ID NO: 5494, respectively. In an aspect, the first gRNA molecule and the second gRNA molecule include targeting domains comprising, e.g., consisting of, SEQ ID NO: 5593 and SEQ ID NO: 5508, respectively. In an aspect, the first gRNA molecule and the second gRNA molecule include targeting domains comprising, e.g., consisting of, SEQ ID NO: 5593 and SEQ ID NO: 5514, respectively. In an aspect, the first gRNA molecule and the second gRNA molecule include targeting domains comprising, e.g., consisting of, SEQ ID NO: 5593 and SEQ ID NO: 5492, respectively. In an aspect, the first gRNA molecule and the second gRNA molecule include targeting domains comprising, e.g., consisting of, SEQ ID NO: 5574 and SEQ ID NO: 5519, respectively. In an aspect, the first gRNA molecule and the second gRNA molecule include targeting domains comprising, e.g., consisting of, SEQ ID NO: 5574 and SEQ ID NO: 5497, respectively. In an aspect, the first gRNA molecule and the second gRNA molecule include targeting domains comprising, e.g., consisting of, SEQ ID NO: 5574 and SEQ ID NO: 5499, respectively. In an aspect, the first gRNA molecule and the second gRNA molecule include targeting domains comprising, e.g., consisting of, SEQ ID NO: 5574 and SEQ ID NO: 5498, respectively. In an aspect, the first gRNA molecule and the second gRNA molecule include targeting domains comprising, e.g., consisting of, SEQ ID NO: 5574 and SEQ ID NO: 5503, respectively. In an aspect, the first gRNA molecule and the second gRNA molecule include targeting domains comprising, e.g., consisting of, SEQ ID NO: 5574 and SEQ ID NO: 5496, respectively. In an aspect, the first gRNA molecule and the second gRNA molecule include targeting domains comprising, e.g., consisting of, SEQ ID NO: 5574 and SEQ ID NO: 5507, respectively. In an aspect, the first gRNA molecule and the second gRNA molecule include targeting domains comprising, e.g., consisting of, SEQ ID NO: 5574 and SEQ ID NO: 5515, respectively. In an aspect, the first gRNA molecule and the second gRNA molecule include targeting domains comprising, e.g., consisting of, SEQ ID NO: 5574 and SEQ ID NO: 5493, respectively. In an aspect, the first gRNA molecule and the second gRNA molecule include targeting domains comprising, e.g., consisting of, SEQ ID NO: 5574 and SEQ ID NO: 5506, respectively. In an aspect, the first gRNA molecule and the second gRNA molecule include targeting domains comprising, e.g., consisting of, SEQ ID NO: 5574 and SEQ ID NO: 5509, respectively. In an aspect, the first gRNA molecule and the second gRNA molecule include targeting domains comprising, e.g., consisting of, SEQ ID NO: 5574 and SEQ ID NO: 5517, respectively. In an aspect, the first gRNA molecule and the second gRNA molecule include targeting domains comprising, e.g., consisting of, SEQ ID NO: 5574 and SEQ ID NO: 5521, respectively. In an aspect, the first gRNA molecule and the second gRNA molecule include targeting domains comprising, e.g., consisting of, SEQ ID NO: 5574 and SEQ ID NO: 5520, respectively. In an aspect, the first gRNA molecule and the second gRNA molecule include targeting domains comprising, e.g., consisting of, SEQ ID NO: 5574 and SEQ ID NO: 5500, respectively. In an aspect, the first gRNA molecule and the second gRNA molecule include targeting domains comprising, e.g., consisting of, SEQ ID NO: 5574 and SEQ ID NO: 5494, respectively. In an aspect, the first gRNA molecule and the second gRNA molecule include targeting domains comprising, e.g., consisting of, SEQ ID NO: 5574 and SEQ ID NO: 5508, respectively. In an aspect, the first gRNA molecule and the second gRNA molecule include targeting domains comprising, e.g., consisting of, SEQ ID NO: 5574 and SEQ ID NO: 5514, respectively. In an aspect, the first gRNA molecule and the second gRNA molecule include targeting domains comprising, e.g., consisting of, SEQ ID NO: 5574 and SEQ ID NO: 5492, respectively. In an aspect, the first gRNA molecule and the second gRNA molecule include targeting domains comprising, e.g., consisting of, SEQ ID NO: 5598 and SEQ ID NO: 5519, respectively. In an aspect, the first gRNA molecule and the second gRNA molecule include targeting domains comprising, e.g., consisting of, SEQ ID NO: 5598 and SEQ ID NO: 5497, respectively. In an aspect, the first gRNA molecule and the second gRNA molecule include targeting domains comprising, e.g., consisting of, SEQ ID NO: 5598 and SEQ ID NO: 5499, respectively. In an aspect, the first gRNA molecule and the second gRNA molecule include targeting domains comprising, e.g., consisting of, SEQ ID NO: 5598 and SEQ ID NO: 5498, respectively. In an aspect, the first gRNA molecule and the second gRNA molecule include targeting domains comprising, e.g., consisting of, SEQ ID NO: 5598 and SEQ ID NO: 5503, respectively. In an aspect, the first gRNA molecule and the second gRNA molecule include targeting domains comprising, e.g., consisting of, SEQ ID NO: 5598 and SEQ ID NO: 5496, respectively. In an aspect, the first gRNA molecule and the second gRNA molecule include targeting domains comprising, e.g., consisting of, SEQ ID NO: 5598 and SEQ ID NO: 5507, respectively. In an aspect, the first gRNA molecule and the second gRNA molecule include targeting domains comprising, e.g., consisting of, SEQ ID NO: 5598 and SEQ ID NO: 5515, respectively. In an aspect, the first gRNA molecule and the second gRNA molecule include targeting domains comprising, e.g., consisting of, SEQ ID NO: 5598 and SEQ ID NO: 5493, respectively. In an aspect, the first gRNA molecule and the second gRNA molecule include targeting domains comprising, e.g., consisting of, SEQ ID NO: 5598 and SEQ ID NO: 5506, respectively. In an aspect, the first gRNA molecule and the second gRNA molecule include targeting domains comprising, e.g., consisting of, SEQ ID NO: 5598 and SEQ ID NO: 5509, respectively. In an aspect, the first gRNA molecule and the second gRNA molecule include targeting domains comprising, e.g., consisting of, SEQ ID NO: 5598 and SEQ ID NO: 5517, respectively. In an aspect, the first gRNA molecule and the second gRNA molecule include targeting domains comprising, e.g., consisting of, SEQ ID NO: 5598 and SEQ ID NO: 5521, respectively. In an aspect, the first gRNA molecule and the second gRNA molecule include targeting domains comprising, e.g., consisting of, SEQ ID NO: 5598 and SEQ ID NO: 5520, respectively. In an aspect, the first gRNA molecule and the second gRNA molecule include targeting domains comprising, e.g., consisting of, SEQ ID NO: 5598 and SEQ ID NO: 5500, respectively. In an aspect, the first gRNA molecule and the second gRNA molecule include targeting domains comprising, e.g., consisting of, SEQ ID NO: 5598 and SEQ ID NO: 5494, respectively. In an aspect, the first gRNA molecule and the second gRNA molecule include targeting domains comprising, e.g., consisting of, SEQ ID NO: 5598 and SEQ ID NO: 5508, respectively. In an aspect, the first gRNA molecule and the second gRNA molecule include targeting domains comprising, e.g., consisting of, SEQ ID NO: 5598 and SEQ ID NO: 5514, respectively. In an aspect, the first gRNA molecule and the second gRNA molecule include targeting domains comprising, e.g., consisting of, SEQ ID NO: 5598 and SEQ ID NO: 5492, respectively. In an aspect, the first gRNA molecule and the second gRNA molecule include targeting domains comprising, e.g., consisting of, SEQ ID NO: 5586 and SEQ ID NO: 5519, respectively. In an aspect, the first gRNA molecule and the second gRNA molecule include targeting domains comprising, e.g., consisting of, SEQ ID NO: 5586 and SEQ ID NO: 5497, respectively. In an aspect, the first gRNA molecule and the second gRNA molecule include targeting domains comprising, e.g., consisting of, SEQ ID NO: 5586 and SEQ ID NO: 5499, respectively. In an aspect, the first gRNA molecule and the second gRNA molecule include targeting domains comprising, e.g., consisting of, SEQ ID NO: 5586 and SEQ ID NO: 5498, respectively. In an aspect, the first gRNA molecule and the second gRNA molecule include targeting domains comprising, e.g., consisting of, SEQ ID NO: 5586 and SEQ ID NO: 5503, respectively. In an aspect, the first gRNA molecule and the second gRNA molecule include targeting domains comprising, e.g., consisting of, SEQ ID NO: 5586 and SEQ ID NO: 5496, respectively. In an aspect, the first gRNA molecule and the second gRNA molecule include targeting domains comprising, e.g., consisting of, SEQ ID NO: 5586 and SEQ ID NO: 5507, respectively. In an aspect, the first gRNA molecule and the second gRNA molecule include targeting domains comprising, e.g., consisting of, SEQ ID NO: 5586 and SEQ ID NO: 5515, respectively. In an aspect, the first gRNA molecule and the second gRNA molecule include targeting domains comprising, e.g., consisting of, SEQ ID NO: 5586 and SEQ ID NO: 5493, respectively. In an aspect, the first gRNA molecule and the second gRNA molecule include targeting domains comprising, e.g., consisting of, SEQ ID NO: 5586 and SEQ ID NO: 5506, respectively. In an aspect, the first gRNA molecule and the second gRNA molecule include targeting domains comprising, e.g., consisting of, SEQ ID NO: 5586 and SEQ ID NO: 5509, respectively. In an aspect, the first gRNA molecule and the second gRNA molecule include targeting domains comprising, e.g., consisting of, SEQ ID NO: 5586 and SEQ ID NO: 5517, respectively. In an aspect, the first gRNA molecule and the second gRNA molecule include targeting domains comprising, e.g., consisting of, SEQ ID NO: 5586 and SEQ ID NO: 5521, respectively. In an aspect, the first gRNA molecule and the second gRNA molecule include targeting domains comprising, e.g., consisting of, SEQ ID NO: 5586 and SEQ ID NO: 5520, respectively. In an aspect, the first gRNA molecule and the second gRNA molecule include targeting domains comprising, e.g., consisting of, SEQ ID NO: 5586 and SEQ ID NO: 5500, respectively. In an aspect, the first gRNA molecule and the second gRNA molecule include targeting domains comprising, e.g., consisting of, SEQ ID NO: 5586 and SEQ ID NO: 5494, respectively. In an aspect, the first gRNA molecule and the second gRNA molecule include targeting domains comprising, e.g., consisting of, SEQ ID NO: 5586 and SEQ ID NO: 5508, respectively. In an aspect, the first gRNA molecule and the second gRNA molecule include targeting domains comprising, e.g., consisting of, SEQ ID NO: 5586 and SEQ ID NO: 5514, respectively. In an aspect, the first gRNA molecule and the second gRNA molecule include targeting domains comprising, e.g., consisting of, SEQ ID NO: 5586 and SEQ ID NO: 5492, respectively. In an aspect, the first gRNA molecule and the second gRNA molecule include targeting domains comprising, e.g., consisting of, SEQ ID NO: 5599 and SEQ ID NO: 5519, respectively. In an aspect, the first gRNA molecule and the second gRNA molecule include targeting domains comprising, e.g., consisting of, SEQ ID NO: 5599 and SEQ ID NO: 5497, respectively. In an aspect, the first gRNA molecule and the second gRNA molecule include targeting domains comprising, e.g., consisting of, SEQ ID NO: 5599 and SEQ ID NO: 5499, respectively. In an aspect, the first gRNA molecule and the second gRNA molecule include targeting domains comprising, e.g., consisting of, SEQ ID NO: 5599 and SEQ ID NO: 5498, respectively. In an aspect, the first gRNA molecule and the second gRNA molecule include targeting domains comprising, e.g., consisting of, SEQ ID NO: 5599 and SEQ ID NO: 5503, respectively. In an aspect, the first gRNA molecule and the second gRNA molecule include targeting domains comprising, e.g., consisting of, SEQ ID NO: 5599 and SEQ ID NO: 5496, respectively. In an aspect, the first gRNA molecule and the second gRNA molecule include targeting domains comprising, e.g., consisting of, SEQ ID NO: 5599 and SEQ ID NO: 5507, respectively. In an aspect, the first gRNA molecule and the second gRNA molecule include targeting domains comprising, e.g., consisting of, SEQ ID NO: 5599 and SEQ ID NO: 5515, respectively. In an aspect, the first gRNA molecule and the second gRNA molecule include targeting domains comprising, e.g., consisting of, SEQ ID NO: 5599 and SEQ ID NO: 5493, respectively. In an aspect, the first gRNA molecule and the second gRNA molecule include targeting domains comprising, e.g., consisting of, SEQ ID NO: 5599 and SEQ ID NO: 5506, respectively. In an aspect, the first gRNA molecule and the second gRNA molecule include targeting domains comprising, e.g., consisting of, SEQ ID NO: 5599 and SEQ ID NO: 5509, respectively. In an aspect, the first gRNA molecule and the second gRNA molecule include targeting domains comprising, e.g., consisting of, SEQ ID NO: 5599 and SEQ ID NO: 5517, respectively. In an aspect, the first gRNA molecule and the second gRNA molecule include targeting domains comprising, e.g., consisting of, SEQ ID NO: 5599 and SEQ ID NO: 5521, respectively. In an aspect, the first gRNA molecule and the second gRNA molecule include targeting domains comprising, e.g., consisting of, SEQ ID NO: 5599 and SEQ ID NO: 5520, respectively. In an aspect, the first gRNA molecule and the second gRNA molecule include targeting domains comprising, e.g., consisting of, SEQ ID NO: 5599 and SEQ ID NO: 5500, respectively. In an aspect, the first gRNA molecule and the second gRNA molecule include targeting domains comprising, e.g., consisting of, SEQ ID NO: 5599 and SEQ ID NO: 5494, respectively. In an aspect, the first gRNA molecule and the second gRNA molecule include targeting domains comprising, e.g., consisting of, SEQ ID NO: 5599 and SEQ ID NO: 5508, respectively. In an aspect, the first gRNA molecule and the second gRNA molecule include targeting domains comprising, e.g., consisting of, SEQ ID NO: 5599 and SEQ ID NO: 5514, respectively. In an aspect, the first gRNA molecule and the second gRNA molecule include targeting domains comprising, e.g., consisting of, SEQ ID NO: 5599 and SEQ ID NO: 5492, respectively. In an aspect, the first gRNA molecule and the second gRNA molecule include targeting domains comprising, e.g., consisting of, SEQ ID NO: 5591 and SEQ ID NO: 5519, respectively. In an aspect, the first gRNA molecule and the second gRNA molecule include targeting domains comprising, e.g., consisting of, SEQ ID NO: 5591 and SEQ ID NO: 5497, respectively. In an aspect, the first gRNA molecule and the second gRNA molecule include targeting domains comprising, e.g., consisting of, SEQ ID NO: 5591 and SEQ ID NO: 5499, respectively. In an aspect, the first gRNA molecule and the second gRNA molecule include targeting domains comprising, e.g., consisting of, SEQ ID NO: 5591 and SEQ ID NO: 5498, respectively. In an aspect, the first gRNA molecule and the second gRNA molecule include targeting domains comprising, e.g., consisting of, SEQ ID NO: 5591 and SEQ ID NO: 5503, respectively. In an aspect, the first gRNA molecule and the second gRNA molecule include targeting domains comprising, e.g., consisting of, SEQ ID NO: 5591 and SEQ ID NO: 5496, respectively. In an aspect, the first gRNA molecule and the second gRNA molecule include targeting domains comprising, e.g., consisting of, SEQ ID NO: 5591 and SEQ ID NO: 5507, respectively. In an aspect, the first gRNA molecule and the second gRNA molecule include targeting domains comprising, e.g., consisting of, SEQ ID NO: 5591 and SEQ ID NO: 5515, respectively. In an aspect, the first gRNA molecule and the second gRNA molecule include targeting domains comprising, e.g., consisting of, SEQ ID NO: 5591 and SEQ ID NO: 5493, respectively. In an aspect, the first gRNA molecule and the second gRNA molecule include targeting domains comprising, e.g., consisting of, SEQ ID NO: 5591 and SEQ ID NO: 5506, respectively. In an aspect, the first gRNA molecule and the second gRNA molecule include targeting domains comprising, e.g., consisting of, SEQ ID NO: 5591 and SEQ ID NO: 5509, respectively. In an aspect, the first gRNA molecule and the second gRNA molecule include targeting domains comprising, e.g., consisting of, SEQ ID NO: 5591 and SEQ ID NO: 5517, respectively. In an aspect, the first gRNA molecule and the second gRNA molecule include targeting domains comprising, e.g., consisting of, SEQ ID NO: 5591 and SEQ ID NO: 5521, respectively. In an aspect, the first gRNA molecule and the second gRNA molecule include targeting domains comprising, e.g., consisting of, SEQ ID NO: 5591 and SEQ ID NO: 5520, respectively. In an aspect, the first gRNA molecule and the second gRNA molecule include targeting domains comprising, e.g., consisting of, SEQ ID NO: 5591 and SEQ ID NO: 5500, respectively. In an aspect, the first gRNA molecule and the second gRNA molecule include targeting domains comprising, e.g., consisting of, SEQ ID NO: 5591 and SEQ ID NO: 5494, respectively. In an aspect, the first gRNA molecule and the second gRNA molecule include targeting domains comprising, e.g., consisting of, SEQ ID NO: 5591 and SEQ ID NO: 5508, respectively. In an aspect, the first gRNA molecule and the second gRNA molecule include targeting domains comprising, e.g., consisting of, SEQ ID NO: 5591 and SEQ ID NO: 5514, respectively. In an aspect, the first gRNA molecule and the second gRNA molecule include targeting domains comprising, e.g., consisting of, SEQ ID NO: 5591 and SEQ ID NO: 5492, respectively. In an aspect, the first gRNA molecule and the second gRNA molecule include targeting domains comprising, e.g., consisting of, SEQ ID NO: 5568 and SEQ ID NO: 5519, respectively. In an aspect, the first gRNA molecule and the second gRNA molecule include targeting domains comprising, e.g., consisting of, SEQ ID NO: 5568 and SEQ ID NO: 5497, respectively. In an aspect, the first gRNA molecule and the second gRNA molecule include targeting domains comprising, e.g., consisting of, SEQ ID NO: 5568 and SEQ ID NO: 5499, respectively. In an aspect, the first gRNA molecule and the second gRNA molecule include targeting domains comprising, e.g., consisting of, SEQ ID NO: 5568 and SEQ ID NO: 5498, respectively. In an aspect, the first gRNA molecule and the second gRNA molecule include targeting domains comprising, e.g., consisting of, SEQ ID NO: 5568 and SEQ ID NO: 5503, respectively. In an aspect, the first gRNA molecule and the second gRNA molecule include targeting domains comprising, e.g., consisting of, SEQ ID NO: 5568 and SEQ ID NO: 5496, respectively. In an aspect, the first gRNA molecule and the second gRNA molecule include targeting domains comprising, e.g., consisting of, SEQ ID NO: 5568 and SEQ ID NO: 5507, respectively. In an aspect, the first gRNA molecule and the second gRNA molecule include targeting domains comprising, e.g., consisting of, SEQ ID NO: 5568 and SEQ ID NO: 5515, respectively. In an aspect, the first gRNA molecule and the second gRNA molecule include targeting domains comprising, e.g., consisting of, SEQ ID NO: 5568 and SEQ ID NO: 5493, respectively. In an aspect, the first gRNA molecule and the second gRNA molecule include targeting domains comprising, e.g., consisting of, SEQ ID NO: 5568 and SEQ ID NO: 5506, respectively. In an aspect, the first gRNA molecule and the second gRNA molecule include targeting domains comprising, e.g., consisting of, SEQ ID NO: 5568 and SEQ ID NO: 5509, respectively. In an aspect, the first gRNA molecule and the second gRNA molecule include targeting domains comprising, e.g., consisting of, SEQ ID NO: 5568 and SEQ ID NO: 5517, respectively. In an aspect, the first gRNA molecule and the second gRNA molecule include targeting domains comprising, e.g., consisting of, SEQ ID NO: 5568 and SEQ ID NO: 5521, respectively. In an aspect, the first gRNA molecule and the second gRNA molecule include targeting domains comprising, e.g., consisting of, SEQ ID NO: 5568 and SEQ ID NO: 5520, respectively. In an aspect, the first gRNA molecule and the second gRNA molecule include targeting domains comprising, e.g., consisting of, SEQ ID NO: 5568 and SEQ ID NO: 5500, respectively. In an aspect, the first gRNA molecule and the second gRNA molecule include targeting domains comprising, e.g., consisting of, SEQ ID NO: 5568 and SEQ ID NO: 5494, respectively. In an aspect, the first gRNA molecule and the second gRNA molecule include targeting domains comprising, e.g., consisting of, SEQ ID NO: 5568 and SEQ ID NO: 5508, respectively. In an aspect, the first gRNA molecule and the second gRNA molecule include targeting domains comprising, e.g., consisting of, SEQ ID NO: 5568 and SEQ ID NO: 5514, respectively. In an aspect, the first gRNA molecule and the second gRNA molecule include targeting domains comprising, e.g., consisting of, SEQ ID NO: 5568 and SEQ ID NO: 5492, respectively. In an aspect, the first gRNA molecule and the second gRNA molecule include targeting domains comprising, e.g., consisting of, SEQ ID NO: 5610 and SEQ ID NO: 5519, respectively. In an aspect, the first gRNA molecule and the second gRNA molecule include targeting domains comprising, e.g., consisting of, SEQ ID NO: 5610 and SEQ ID NO: 5497, respectively. In an aspect, the first gRNA molecule and the second gRNA molecule include targeting domains comprising, e.g., consisting of, SEQ ID NO: 5610 and SEQ ID NO: 5499, respectively. In an aspect, the first gRNA molecule and the second gRNA molecule include targeting domains comprising, e.g., consisting of, SEQ ID NO: 5610 and SEQ ID NO: 5498, respectively. In an aspect, the first gRNA molecule and the second gRNA molecule include targeting domains comprising, e.g., consisting of, SEQ ID NO: 5610 and SEQ ID NO: 5503, respectively. In an aspect, the first gRNA molecule and the second gRNA molecule include targeting domains comprising, e.g., consisting of, SEQ ID NO: 5610 and SEQ ID NO: 5496, respectively. In an aspect, the first gRNA molecule and the second gRNA molecule include targeting domains comprising, e.g., consisting of, SEQ ID NO: 5610 and SEQ ID NO: 5507, respectively. In an aspect, the first gRNA molecule and the second gRNA molecule include targeting domains comprising, e.g., consisting of, SEQ ID NO: 5610 and SEQ ID NO: 5515, respectively. In an aspect, the first gRNA molecule and the second gRNA molecule include targeting domains comprising, e.g., consisting of, SEQ ID NO: 5610 and SEQ ID NO: 5493, respectively. In an aspect, the first gRNA molecule and the second gRNA molecule include targeting domains comprising, e.g., consisting of, SEQ ID NO: 5610 and SEQ ID NO: 5506, respectively. In an aspect, the first gRNA molecule and the second gRNA molecule include targeting domains comprising, e.g., consisting of, SEQ ID NO: 5610 and SEQ ID NO: 5509, respectively. In an aspect, the first gRNA molecule and the second gRNA molecule include targeting domains comprising, e.g., consisting of, SEQ ID NO: 5610 and SEQ ID NO: 5517, respectively. In an aspect, the first gRNA molecule and the second gRNA molecule include targeting domains comprising, e.g., consisting of, SEQ ID NO: 5610 and SEQ ID NO: 5521, respectively. In an aspect, the first gRNA molecule and the second gRNA molecule include targeting domains comprising, e.g., consisting of, SEQ ID NO: 5610 and SEQ ID NO: 5520, respectively. In an aspect, the first gRNA molecule and the second gRNA molecule include targeting domains comprising, e.g., consisting of, SEQ ID NO: 5610 and SEQ ID NO: 5500, respectively. In an aspect, the first gRNA molecule and the second gRNA molecule include targeting domains comprising, e.g., consisting of, SEQ ID NO: 5610 and SEQ ID NO: 5494, respectively. In an aspect, the first gRNA molecule and the second gRNA molecule include targeting domains comprising, e.g., consisting of, SEQ ID NO: 5610 and SEQ ID NO: 5508, respectively. In an aspect, the first gRNA molecule and the second gRNA molecule include targeting domains comprising, e.g., consisting of, SEQ ID NO: 5610 and SEQ ID NO: 5514, respectively. In an aspect, the first gRNA molecule and the second gRNA molecule include targeting domains comprising, e.g., consisting of, SEQ ID NO: 5610 and SEQ ID NO: 5492, respectively. In an aspect, the first gRNA molecule and the second gRNA molecule include targeting domains comprising, e.g., consisting of, SEQ ID NO: 5608 and SEQ ID NO: 5519, respectively. In an aspect, the first gRNA molecule and the second gRNA molecule include targeting domains comprising, e.g., consisting of, SEQ ID NO: 5608 and SEQ ID NO: 5497, respectively. In an aspect, the first gRNA molecule and the second gRNA molecule include targeting domains comprising, e.g., consisting of, SEQ ID NO: 5608 and SEQ ID NO: 5499, respectively. In an aspect, the first gRNA molecule and the second gRNA molecule include targeting domains comprising, e.g., consisting of, SEQ ID NO: 5608 and SEQ ID NO: 5498, respectively. In an aspect, the first gRNA molecule and the second gRNA molecule include targeting domains comprising, e.g., consisting of, SEQ ID NO: 5608 and SEQ ID NO: 5503, respectively. In an aspect, the first gRNA molecule and the second gRNA molecule include targeting domains comprising, e.g., consisting of, SEQ ID NO: 5608 and SEQ ID NO: 5496, respectively. In an aspect, the first gRNA molecule and the second gRNA molecule include targeting domains comprising, e.g., consisting of, SEQ ID NO: 5608 and SEQ ID NO: 5507, respectively. In an aspect, the first gRNA molecule and the second gRNA molecule include targeting domains comprising, e.g., consisting of, SEQ ID NO: 5608 and SEQ ID NO: 5515, respectively. In an aspect, the first gRNA molecule and the second gRNA molecule include targeting domains comprising, e.g., consisting of, SEQ ID NO: 5608 and SEQ ID NO: 5493, respectively. In an aspect, the first gRNA molecule and the second gRNA molecule include targeting domains comprising, e.g., consisting of, SEQ ID NO: 5608 and SEQ ID NO: 5506, respectively. In an aspect, the first gRNA molecule and the second gRNA molecule include targeting domains comprising, e.g., consisting of, SEQ ID NO: 5608 and SEQ ID NO: 5509, respectively. In an aspect, the first gRNA molecule and the second gRNA molecule include targeting domains comprising, e.g., consisting of, SEQ ID NO: 5608 and SEQ ID NO: 5517, respectively. In an aspect, the first gRNA molecule and the second gRNA molecule include targeting domains comprising, e.g., consisting of, SEQ ID NO: 5608 and SEQ ID NO: 5521, respectively. In an aspect, the first gRNA molecule and the second gRNA molecule include targeting domains comprising, e.g., consisting of, SEQ ID NO: 5608 and SEQ ID NO: 5520, respectively. In an aspect, the first gRNA molecule and the second gRNA molecule include targeting domains comprising, e.g., consisting of, SEQ ID NO: 5608 and SEQ ID NO: 5500, respectively. In an aspect, the first gRNA molecule and the second gRNA molecule include targeting domains comprising, e.g., consisting of, SEQ ID NO: 5608 and SEQ ID NO: 5494, respectively. In an aspect, the first gRNA molecule and the second gRNA molecule include targeting domains comprising, e.g., consisting of, SEQ ID NO: 5608 and SEQ ID NO: 5508, respectively. In an aspect, the first gRNA molecule and the second gRNA molecule include targeting domains comprising, e.g., consisting of, SEQ ID NO: 5608 and SEQ ID NO: 5514, respectively. In an aspect, the first gRNA molecule and the second gRNA molecule include targeting domains comprising, e.g., consisting of, SEQ ID NO: 5608 and SEQ ID NO: 5492, respectively. In an aspect, the first gRNA molecule and the second gRNA molecule include targeting domains comprising, e.g., consisting of, SEQ ID NO: 5617 and SEQ ID NO: 5519, respectively. In an aspect, the first gRNA molecule and the second gRNA molecule include targeting domains comprising, e.g., consisting of, SEQ ID NO: 5617 and SEQ ID NO: 5497, respectively. In an aspect, the first gRNA molecule and the second gRNA molecule include targeting domains comprising, e.g., consisting of, SEQ ID NO: 5617 and SEQ ID NO: 5499, respectively. In an aspect, the first gRNA molecule and the second gRNA molecule include targeting domains comprising, e.g., consisting of, SEQ ID NO: 5617 and SEQ ID NO: 5498, respectively. In an aspect, the first gRNA molecule and the second gRNA molecule include targeting domains comprising, e.g., consisting of, SEQ ID NO: 5617 and SEQ ID NO: 5503, respectively. In an aspect, the first gRNA molecule and the second gRNA molecule include targeting domains comprising, e.g., consisting of, SEQ ID NO: 5617 and SEQ ID NO: 5496, respectively. In an aspect, the first gRNA molecule and the second gRNA molecule include targeting domains comprising, e.g., consisting of, SEQ ID NO: 5617 and SEQ ID NO: 5507, respectively. In an aspect, the first gRNA molecule and the second gRNA molecule include targeting domains comprising, e.g., consisting of, SEQ ID NO: 5617 and SEQ ID NO: 5515, respectively. In an aspect, the first gRNA molecule and the second gRNA molecule include targeting domains comprising, e.g., consisting of, SEQ ID NO: 5617 and SEQ ID NO: 5493, respectively. In an aspect, the first gRNA molecule and the second gRNA molecule include targeting domains comprising, e.g., consisting of, SEQ ID NO: 5617 and SEQ ID NO: 5506, respectively. In an aspect, the first gRNA molecule and the second gRNA molecule include targeting domains comprising, e.g., consisting of, SEQ ID NO: 5617 and SEQ ID NO: 5509, respectively. In an aspect, the first gRNA molecule and the second gRNA molecule include targeting domains comprising, e.g., consisting of, SEQ ID NO: 5617 and SEQ ID NO: 5517, respectively. In an aspect, the first gRNA molecule and the second gRNA molecule include targeting domains comprising, e.g., consisting of, SEQ ID NO: 5617 and SEQ ID NO: 5521, respectively. In an aspect, the first gRNA molecule and the second gRNA molecule include targeting domains comprising, e.g., consisting of, SEQ ID NO: 5617 and SEQ ID NO: 5520, respectively. In an aspect, the first gRNA molecule and the second gRNA molecule include targeting domains comprising, e.g., consisting of, SEQ ID NO: 5617 and SEQ ID NO: 5500, respectively. In an aspect, the first gRNA molecule and the second gRNA molecule include targeting domains comprising, e.g., consisting of, SEQ ID NO: 5617 and SEQ ID NO: 5494, respectively. In an aspect, the first gRNA molecule and the second gRNA molecule include targeting domains comprising, e.g., consisting of, SEQ ID NO: 5617 and SEQ ID NO: 5508, respectively. In an aspect, the first gRNA molecule and the second gRNA molecule include targeting domains comprising, e.g., consisting of, SEQ ID NO: 5617 and SEQ ID NO: 5514, respectively. In an aspect, the first gRNA molecule and the second gRNA molecule include targeting domains comprising, e.g., consisting of, SEQ ID NO: 5617 and SEQ ID NO: 5492, respectively. In an aspect, the first gRNA molecule and the second gRNA molecule include targeting domains comprising, e.g., consisting of, SEQ ID NO: 5619 and SEQ ID NO: 5519, respectively. In an aspect, the first gRNA molecule and the second gRNA molecule include targeting domains comprising, e.g., consisting of, SEQ ID NO: 5619 and SEQ ID NO: 5497, respectively. In an aspect, the first gRNA molecule and the second gRNA molecule include targeting domains comprising, e.g., consisting of, SEQ ID NO: 5619 and SEQ ID NO: 5499, respectively. In an aspect, the first gRNA molecule and the second gRNA molecule include targeting domains comprising, e.g., consisting of, SEQ ID NO: 5619 and SEQ ID NO: 5498, respectively. In an aspect, the first gRNA molecule and the second gRNA molecule include targeting domains comprising, e.g., consisting of, SEQ ID NO: 5619 and SEQ ID NO: 5503, respectively. In an aspect, the first gRNA molecule and the second gRNA molecule include targeting domains comprising, e.g., consisting of, SEQ ID NO: 5619 and SEQ ID NO: 5496, respectively. In an aspect, the first gRNA molecule and the second gRNA molecule include targeting domains comprising, e.g., consisting of, SEQ ID NO: 5619 and SEQ ID NO: 5507, respectively. In an aspect, the first gRNA molecule and the second gRNA molecule include targeting domains comprising, e.g., consisting of, SEQ ID NO: 5619 and SEQ ID NO: 5515, respectively. In an aspect, the first gRNA molecule and the second gRNA molecule include targeting domains comprising, e.g., consisting of, SEQ ID NO: 5619 and SEQ ID NO: 5493, respectively. In an aspect, the first gRNA molecule and the second gRNA molecule include targeting domains comprising, e.g., consisting of, SEQ ID NO: 5619 and SEQ ID NO: 5506, respectively. In an aspect, the first gRNA molecule and the second gRNA molecule include targeting domains comprising, e.g., consisting of, SEQ ID NO: 5619 and SEQ ID NO: 5509, respectively. In an aspect, the first gRNA molecule and the second gRNA molecule include targeting domains comprising, e.g., consisting of, SEQ ID NO: 5619 and SEQ ID NO: 5517, respectively. In an aspect, the first gRNA molecule and the second gRNA molecule include targeting domains comprising, e.g., consisting of, SEQ ID NO: 5619 and SEQ ID NO: 5521, respectively. In an aspect, the first gRNA molecule and the second gRNA molecule include targeting domains comprising, e.g., consisting of, SEQ ID NO: 5619 and SEQ ID NO: 5520, respectively. In an aspect, the first gRNA molecule and the second gRNA molecule include targeting domains comprising, e.g., consisting of, SEQ ID NO: 5619 and SEQ ID NO: 5500, respectively. In an aspect, the first gRNA molecule and the second gRNA molecule include targeting domains comprising, e.g., consisting of, SEQ ID NO: 5619 and SEQ ID NO: 5494, respectively. In an aspect, the first gRNA molecule and the second gRNA molecule include targeting domains comprising, e.g., consisting of, SEQ ID NO: 5619 and SEQ ID NO: 5508, respectively. In an aspect, the first gRNA molecule and the second gRNA molecule include targeting domains comprising, e.g., consisting of, SEQ ID NO: 5619 and SEQ ID NO: 5514, respectively. In an aspect, the first gRNA molecule and the second gRNA molecule include targeting domains comprising, e.g., consisting of, SEQ ID NO: 5619 and SEQ ID NO: 5492, respectively. In an aspect, the first gRNA molecule and the second gRNA molecule include targeting domains comprising, e.g., consisting of, SEQ ID NO: 5620 and SEQ ID NO: 5519, respectively. In an aspect, the first gRNA molecule and the second gRNA molecule include targeting domains comprising, e.g., consisting of, SEQ ID NO: 5620 and SEQ ID NO: 5497, respectively. In an aspect, the first gRNA molecule and the second gRNA molecule include targeting domains comprising, e.g., consisting of, SEQ ID NO: 5620 and SEQ ID NO: 5499, respectively. In an aspect, the first gRNA molecule and the second gRNA molecule include targeting domains comprising, e.g., consisting of, SEQ ID NO: 5620 and SEQ ID NO: 5498, respectively. In an aspect, the first gRNA molecule and the second gRNA molecule include targeting domains comprising, e.g., consisting of, SEQ ID NO: 5620 and SEQ ID NO: 5503, respectively. In an aspect, the first gRNA molecule and the second gRNA molecule include targeting domains comprising, e.g., consisting of, SEQ ID NO: 5620 and SEQ ID NO: 5496, respectively. In an aspect, the first gRNA molecule and the second gRNA molecule include targeting domains comprising, e.g., consisting of, SEQ ID NO: 5620 and SEQ ID NO: 5507, respectively. In an aspect, the first gRNA molecule and the second gRNA molecule include targeting domains comprising, e.g., consisting of, SEQ ID NO: 5620 and SEQ ID NO: 5515, respectively. In an aspect, the first gRNA molecule and the second gRNA molecule include targeting domains comprising, e.g., consisting of, SEQ ID NO: 5620 and SEQ ID NO: 5493, respectively. In an aspect, the first gRNA molecule and the second gRNA molecule include targeting domains comprising, e.g., consisting of, SEQ ID NO: 5620 and SEQ ID NO: 5506, respectively. In an aspect, the first gRNA molecule and the second gRNA molecule include targeting domains comprising, e.g., consisting of, SEQ ID NO: 5620 and SEQ ID NO: 5509, respectively. In an aspect, the first gRNA molecule and the second gRNA molecule include targeting domains comprising, e.g., consisting of, SEQ ID NO: 5620 and SEQ ID NO: 5517, respectively. In an aspect, the first gRNA molecule and the second gRNA molecule include targeting domains comprising, e.g., consisting of, SEQ ID NO: 5620 and SEQ ID NO: 5521, respectively. In an aspect, the first gRNA molecule and the second gRNA molecule include targeting domains comprising, e.g., consisting of, SEQ ID NO: 5620 and SEQ ID NO: 5520, respectively. In an aspect, the first gRNA molecule and the second gRNA molecule include targeting domains comprising, e.g., consisting of, SEQ ID NO: 5620 and SEQ ID NO: 5500, respectively. In an aspect, the first gRNA molecule and the second gRNA molecule include targeting domains comprising, e.g., consisting of, SEQ ID NO: 5620 and SEQ ID NO: 5494, respectively. In an aspect, the first gRNA molecule and the second gRNA molecule include targeting domains comprising, e.g., consisting of, SEQ ID NO: 5620 and SEQ ID NO: 5508, respectively. In an aspect, the first gRNA molecule and the second gRNA molecule include targeting domains comprising, e.g., consisting of, SEQ ID NO: 5620 and SEQ ID NO: 5514, respectively. In an aspect, the first gRNA molecule and the second gRNA molecule include targeting domains comprising, e.g., consisting of, SEQ ID NO: 5620 and SEQ ID NO: 5492, respectively. In any of the aforementioned combinations, the aspect or the embodiment of the invention may additionally include a third gRNA molecule (or more than one gRNA molecules) comprising a targeting domain specific for a sequence of CIITA, e.g. as described herein, e.g., as described herein in Table 6c.

[1153] In aspects of the invention that utilize two or more, e.g., two, gRNA molecules, it may be particularly useful for a first gRNA molecule to comprise a targeting domain specific for a sequence of TRBC (e.g., TRBC1 or TRBC2) and a second gRNA molecule to comprise a targeting domain specific for a sequence of B2M. In such aspects, it is particularly preferred that the first gRNA molecule to TRBC comprises a targeting domain of any gRNA molecule of FIG. 13, and the second gRNA molecule to B2M comprises a targeting domain of any gRNA molecule of FIG. 14. In an aspect, the first gRNA molecule and the second gRNA molecule include targeting domains comprising, e.g., consisting of, SEQ ID NO: 5719 and SEQ ID NO: 5519, respectively. In an aspect, the first gRNA molecule and the second gRNA molecule include targeting domains comprising, e.g., consisting of, SEQ ID NO: 5719 and SEQ ID NO: 5497, respectively. In an aspect, the first gRNA molecule and the second gRNA molecule include targeting domains comprising, e.g., consisting of, SEQ ID NO: 5719 and SEQ ID NO: 5499, respectively. In an aspect, the first gRNA molecule and the second gRNA molecule include targeting domains comprising, e.g., consisting of, SEQ ID NO: 5719 and SEQ ID NO: 5498, respectively. In an aspect, the first gRNA molecule and the second gRNA molecule include targeting domains comprising, e.g., consisting of, SEQ ID NO: 5719 and SEQ ID NO: 5503, respectively. In an aspect, the first gRNA molecule and the second gRNA molecule include targeting domains comprising, e.g., consisting of, SEQ ID NO: 5719 and SEQ ID NO: 5496, respectively. In an aspect, the first gRNA molecule and the second gRNA molecule include targeting domains comprising, e.g., consisting of, SEQ ID NO: 5719 and SEQ ID NO: 5507, respectively. In an aspect, the first gRNA molecule and the second gRNA molecule include targeting domains comprising, e.g., consisting of, SEQ ID NO: 5719 and SEQ ID NO: 5515, respectively. In an aspect, the first gRNA molecule and the second gRNA molecule include targeting domains comprising, e.g., consisting of, SEQ ID NO: 5719 and SEQ ID NO: 5493, respectively. In an aspect, the first gRNA molecule and the second gRNA molecule include targeting domains comprising, e.g., consisting of, SEQ ID NO: 5719 and SEQ ID NO: 5506, respectively. In an aspect, the first gRNA molecule and the second gRNA molecule include targeting domains comprising, e.g., consisting of, SEQ ID NO: 5719 and SEQ ID NO: 5509, respectively. In an aspect, the first gRNA molecule and the second gRNA molecule include targeting domains comprising, e.g., consisting of, SEQ ID NO: 5719 and SEQ ID NO: 5517, respectively. In an aspect, the first gRNA molecule and the second gRNA molecule include targeting domains comprising, e.g., consisting of, SEQ ID NO: 5719 and SEQ ID NO: 5521, respectively. In an aspect, the first gRNA molecule and the second gRNA molecule include targeting domains comprising, e.g., consisting of, SEQ ID NO: 5719 and SEQ ID NO: 5520, respectively. In an aspect, the first gRNA molecule and the second gRNA molecule include targeting domains comprising, e.g., consisting of, SEQ ID NO: 5719 and SEQ ID NO: 5500, respectively. In an aspect, the first gRNA molecule and the second gRNA molecule include targeting domains comprising, e.g., consisting of, SEQ ID NO: 5719 and SEQ ID NO: 5494, respectively. In an aspect, the first gRNA molecule and the second gRNA molecule include targeting domains comprising, e.g., consisting of, SEQ ID NO: 5719 and SEQ ID NO: 5508, respectively. In an aspect, the first gRNA molecule and the second gRNA molecule include targeting domains comprising, e.g., consisting of, SEQ ID NO: 5719 and SEQ ID NO: 5514, respectively. In an aspect, the first gRNA molecule and the second gRNA molecule include targeting domains comprising, e.g., consisting of, SEQ ID NO: 5719 and SEQ ID NO: 5492, respectively. In an aspect, the first gRNA molecule and the second gRNA molecule include targeting domains comprising, e.g., consisting of, SEQ ID NO: 5694 and SEQ ID NO: 5519, respectively. In an aspect, the first gRNA molecule and the second gRNA molecule include targeting domains comprising, e.g., consisting of, SEQ ID NO: 5694 and SEQ ID NO: 5497, respectively. In an aspect, the first gRNA molecule and the second gRNA molecule include targeting domains comprising, e.g., consisting of, SEQ ID NO: 5694 and SEQ ID NO: 5499, respectively. In an aspect, the first gRNA molecule and the second gRNA molecule include targeting domains comprising, e.g., consisting of, SEQ ID NO: 5694 and SEQ ID NO: 5498, respectively. In an aspect, the first gRNA molecule and the second gRNA molecule include targeting domains comprising, e.g., consisting of, SEQ ID NO: 5694 and SEQ ID NO: 5503, respectively. In an aspect, the first gRNA molecule and the second gRNA molecule include targeting domains comprising, e.g., consisting of, SEQ ID NO: 5694 and SEQ ID NO: 5496, respectively. In an aspect, the first gRNA molecule and the second gRNA molecule include targeting domains comprising, e.g., consisting of, SEQ ID NO: 5694 and SEQ ID NO: 5507, respectively. In an aspect, the first gRNA molecule and the second gRNA molecule include targeting domains comprising, e.g., consisting of, SEQ ID NO: 5694 and SEQ ID NO: 5515, respectively. In an aspect, the first gRNA molecule and the second gRNA molecule include targeting domains comprising, e.g., consisting of, SEQ ID NO: 5694 and SEQ ID NO: 5493, respectively. In an aspect, the first gRNA molecule and the second gRNA molecule include targeting domains comprising, e.g., consisting of, SEQ ID NO: 5694 and SEQ ID NO: 5506, respectively. In an aspect, the first gRNA molecule and the second gRNA molecule include targeting domains comprising, e.g., consisting of, SEQ ID NO: 5694 and SEQ ID NO: 5509, respectively. In an aspect, the first gRNA molecule and the second gRNA molecule include targeting domains comprising, e.g., consisting of, SEQ ID NO: 5694 and SEQ ID NO: 5517, respectively. In an aspect, the first gRNA molecule and the second gRNA molecule include targeting domains comprising, e.g., consisting of, SEQ ID NO: 5694 and SEQ ID NO: 5521, respectively. In an aspect, the first gRNA molecule and the second gRNA molecule include targeting domains comprising, e.g., consisting of, SEQ ID NO: 5694 and SEQ ID NO: 5520, respectively. In an aspect, the first gRNA molecule and the second gRNA molecule include targeting domains comprising, e.g., consisting of, SEQ ID NO: 5694 and SEQ ID NO: 5500, respectively. In an aspect, the first gRNA molecule and the second gRNA molecule include targeting domains comprising, e.g., consisting of, SEQ ID NO: 5694 and SEQ ID NO: 5494, respectively. In an aspect, the first gRNA molecule and the second gRNA molecule include targeting domains comprising, e.g., consisting of, SEQ ID NO: 5694 and SEQ ID NO: 5508, respectively. In an aspect, the first gRNA molecule and the second gRNA molecule include targeting domains comprising, e.g., consisting of, SEQ ID NO: 5694 and SEQ ID NO: 5514, respectively. In an aspect, the first gRNA molecule and the second gRNA molecule include targeting domains comprising, e.g., consisting of, SEQ ID NO: 5694 and SEQ ID NO: 5492, respectively. In an aspect, the first gRNA molecule and the second gRNA molecule include targeting domains comprising, e.g., consisting of, SEQ ID NO: 5706 and SEQ ID NO: 5519, respectively. In an aspect, the first gRNA molecule and the second gRNA molecule include targeting domains comprising, e.g., consisting of, SEQ ID NO: 5706 and SEQ ID NO: 5497, respectively. In an aspect, the first gRNA molecule and the second gRNA molecule include targeting domains comprising, e.g., consisting of, SEQ ID NO: 5706 and SEQ ID NO: 5499, respectively. In an aspect, the first gRNA molecule and the second gRNA molecule include targeting domains comprising, e.g., consisting of, SEQ ID NO: 5706 and SEQ ID NO: 5498, respectively. In an aspect, the first gRNA molecule and the second gRNA molecule include targeting domains comprising, e.g., consisting of, SEQ ID NO: 5706 and SEQ ID NO: 5503, respectively. In an aspect, the first gRNA molecule and the second gRNA molecule include targeting domains comprising, e.g., consisting of, SEQ ID NO: 5706 and SEQ ID NO: 5496, respectively. In an aspect, the first gRNA molecule and the second gRNA molecule include targeting domains comprising, e.g., consisting of, SEQ ID NO: 5706 and SEQ ID NO: 5507, respectively. In an aspect, the first gRNA molecule and the second gRNA molecule include targeting domains comprising, e.g., consisting of, SEQ ID NO: 5706 and SEQ ID NO: 5515, respectively. In an aspect, the first gRNA molecule and the second gRNA molecule include targeting domains comprising, e.g., consisting of, SEQ ID NO: 5706 and SEQ ID NO: 5493, respectively. In an aspect, the first gRNA molecule and the second gRNA molecule include targeting domains comprising, e.g., consisting of, SEQ ID NO: 5706 and SEQ ID NO: 5506, respectively. In an aspect, the first gRNA molecule and the second gRNA molecule include targeting domains comprising, e.g., consisting of, SEQ ID NO: 5706 and SEQ ID NO: 5509, respectively. In an aspect, the first gRNA molecule and the second gRNA molecule include targeting domains comprising, e.g., consisting of, SEQ ID NO: 5706 and SEQ ID NO: 5517, respectively. In an aspect, the first gRNA molecule and the second gRNA molecule include targeting domains comprising, e.g., consisting of, SEQ ID NO: 5706 and SEQ ID NO: 5521, respectively. In an aspect, the first gRNA molecule and the second gRNA molecule include targeting domains comprising, e.g., consisting of, SEQ ID NO: 5706 and SEQ ID NO: 5520, respectively. In an aspect, the first gRNA molecule and the second gRNA molecule include targeting domains comprising, e.g., consisting of, SEQ ID NO: 5706 and SEQ ID NO: 5500, respectively. In an aspect, the first gRNA molecule and the second gRNA molecule include targeting domains comprising, e.g., consisting of, SEQ ID NO: 5706 and SEQ ID NO: 5494, respectively. In an aspect, the first gRNA molecule and the second gRNA molecule include targeting domains comprising, e.g., consisting of, SEQ ID NO: 5706 and SEQ ID NO: 5508, respectively. In an aspect, the first gRNA molecule and the second gRNA molecule include targeting domains comprising, e.g., consisting of, SEQ ID NO: 5706 and SEQ ID NO: 5514, respectively. In an aspect, the first gRNA molecule and the second gRNA molecule include targeting domains comprising, e.g., consisting of, SEQ ID NO: 5706 and SEQ ID NO: 5492, respectively. In an aspect, the first gRNA molecule and the second gRNA molecule include targeting domains comprising, e.g., consisting of, SEQ ID NO: 5696 and SEQ ID NO: 5519, respectively. In an aspect, the first gRNA molecule and the second gRNA molecule include targeting domains comprising, e.g., consisting of, SEQ ID NO: 5696 and SEQ ID NO: 5497, respectively. In an aspect, the first gRNA molecule and the second gRNA molecule include targeting domains comprising, e.g., consisting of, SEQ ID NO: 5696 and SEQ ID NO: 5499, respectively. In an aspect, the first gRNA molecule and the second gRNA molecule include targeting domains comprising, e.g., consisting of, SEQ ID NO: 5696 and SEQ ID NO: 5498, respectively. In an aspect, the first gRNA molecule and the second gRNA molecule include targeting domains comprising, e.g., consisting of, SEQ ID NO: 5696 and SEQ ID NO: 5503, respectively. In an aspect, the first gRNA molecule and the second gRNA molecule include targeting domains comprising, e.g., consisting of, SEQ ID NO: 5696 and SEQ ID NO: 5496, respectively. In an aspect, the first gRNA molecule and the second gRNA molecule include targeting domains comprising, e.g., consisting of, SEQ ID NO: 5696 and SEQ ID NO: 5507, respectively. In an aspect, the first gRNA molecule and the second gRNA molecule include targeting domains comprising, e.g., consisting of, SEQ ID NO: 5696 and SEQ ID NO: 5515, respectively. In an aspect, the first gRNA molecule and the second gRNA molecule include targeting domains comprising, e.g., consisting of, SEQ ID NO: 5696 and SEQ ID NO: 5493, respectively. In an aspect, the first gRNA molecule and the second gRNA molecule include targeting domains comprising, e.g., consisting of, SEQ ID NO: 5696 and SEQ ID NO: 5506, respectively. In an aspect, the first gRNA molecule and the second gRNA molecule include targeting domains comprising, e.g., consisting of, SEQ ID NO: 5696 and SEQ ID NO: 5509, respectively. In an aspect, the first gRNA molecule and the second gRNA molecule include targeting domains comprising, e.g., consisting of, SEQ ID NO: 5696 and SEQ ID NO: 5517, respectively. In an aspect, the first gRNA molecule and the second gRNA molecule include targeting domains comprising, e.g., consisting of, SEQ ID NO: 5696 and SEQ ID NO: 5521, respectively. In an aspect, the first gRNA molecule and the second gRNA molecule include targeting domains comprising, e.g., consisting of, SEQ ID NO: 5696 and SEQ ID NO: 5520, respectively. In an aspect, the first gRNA molecule and the second gRNA molecule include targeting domains comprising, e.g., consisting of, SEQ ID NO: 5696 and SEQ ID NO: 5500, respectively. In an aspect, the first gRNA molecule and the second gRNA molecule include targeting domains comprising, e.g., consisting of, SEQ ID NO: 5696 and SEQ ID NO: 5494, respectively. In an aspect, the first gRNA molecule and the second gRNA molecule include targeting domains comprising, e.g., consisting of, SEQ ID NO: 5696 and SEQ ID NO: 5508, respectively. In an aspect, the first gRNA molecule and the second gRNA molecule include targeting domains comprising, e.g., consisting of, SEQ ID NO: 5696 and SEQ ID NO: 5514, respectively. In an aspect, the first gRNA molecule and the second gRNA molecule include targeting domains comprising, e.g., consisting of, SEQ ID NO: 5696 and SEQ ID NO: 5492, respectively. In an aspect, the first gRNA molecule and the second gRNA molecule include targeting domains comprising, e.g., consisting of, SEQ ID NO: 5711 and SEQ ID NO: 5519, respectively. In an aspect, the first gRNA molecule and the second gRNA molecule include targeting domains comprising, e.g., consisting of, SEQ ID NO: 5711 and SEQ ID NO: 5497, respectively. In an aspect, the first gRNA molecule and the second gRNA molecule include targeting domains comprising, e.g., consisting of, SEQ ID NO: 5711 and SEQ ID NO: 5499, respectively. In an aspect, the first gRNA molecule and the second gRNA molecule include targeting domains comprising, e.g., consisting of, SEQ ID NO: 5711 and SEQ ID NO: 5498, respectively. In an aspect, the first gRNA molecule and the second gRNA molecule include targeting domains comprising, e.g., consisting of, SEQ ID NO: 5711 and SEQ ID NO: 5503, respectively. In an aspect, the first gRNA molecule and the second gRNA molecule include targeting domains comprising, e.g., consisting of, SEQ ID NO: 5711 and SEQ ID NO: 5496, respectively. In an aspect, the first gRNA molecule and the second gRNA molecule include targeting domains comprising, e.g., consisting of, SEQ ID NO: 5711 and SEQ ID NO: 5507, respectively. In an aspect, the first gRNA molecule and the second gRNA molecule include targeting domains comprising, e.g., consisting of, SEQ ID NO: 5711 and SEQ ID NO: 5515, respectively. In an aspect, the first gRNA molecule and the second gRNA molecule include targeting domains comprising, e.g., consisting of, SEQ ID NO: 5711 and SEQ ID NO: 5493, respectively. In an aspect, the first gRNA molecule and the second gRNA molecule include targeting domains comprising, e.g., consisting of, SEQ ID NO: 5711 and SEQ ID NO: 5506, respectively. In an aspect, the first gRNA molecule and the second gRNA molecule include targeting domains comprising, e.g., consisting of, SEQ ID NO: 5711 and SEQ ID NO: 5509, respectively. In an aspect, the first gRNA molecule and the second gRNA molecule include targeting domains comprising, e.g., consisting of, SEQ ID NO: 5711 and SEQ ID NO: 5517, respectively. In an aspect, the first gRNA molecule and the second gRNA molecule include targeting domains comprising, e.g., consisting of, SEQ ID NO: 5711 and SEQ ID NO: 5521, respectively. In an aspect, the first gRNA molecule and the second gRNA molecule include targeting domains comprising, e.g., consisting of, SEQ ID NO: 5711 and SEQ ID NO: 5520, respectively. In an aspect, the first gRNA molecule and the second gRNA molecule include targeting domains comprising, e.g., consisting of, SEQ ID NO: 5711 and SEQ ID NO: 5500, respectively. In an aspect, the first gRNA molecule and the second gRNA molecule include targeting domains comprising, e.g., consisting of, SEQ ID NO: 5711 and SEQ ID NO: 5494, respectively. In an aspect, the first gRNA molecule and the second gRNA molecule include targeting domains comprising, e.g., consisting of, SEQ ID NO: 5711 and SEQ ID NO: 5508, respectively. In an aspect, the first gRNA molecule and the second gRNA molecule include targeting domains comprising, e.g., consisting of, SEQ ID NO: 5711 and SEQ ID NO: 5514, respectively. In an aspect, the first gRNA molecule and the second gRNA molecule include targeting domains comprising, e.g., consisting of, SEQ ID NO: 5711 and SEQ ID NO: 5492, respectively. In an aspect, the first gRNA molecule and the second gRNA molecule include targeting domains comprising, e.g., consisting of, SEQ ID NO: 5708 and SEQ ID NO: 5519, respectively. In an aspect, the first gRNA molecule and the second gRNA molecule include targeting domains comprising, e.g., consisting of, SEQ ID NO: 5708 and SEQ ID NO: 5497, respectively. In an aspect, the first gRNA molecule and the second gRNA molecule include targeting domains comprising, e.g., consisting of, SEQ ID NO: 5708 and SEQ ID NO: 5499, respectively. In an aspect, the first gRNA molecule and the second gRNA molecule include targeting domains comprising, e.g., consisting of, SEQ ID NO: 5708 and SEQ ID NO: 5498, respectively. In an aspect, the first gRNA molecule and the second gRNA molecule include targeting domains comprising, e.g., consisting of, SEQ ID NO: 5708 and SEQ ID NO: 5503, respectively. In an aspect, the first gRNA molecule and the second gRNA molecule include targeting domains comprising, e.g., consisting of, SEQ ID NO: 5708 and SEQ ID NO: 5496, respectively. In an aspect, the first gRNA molecule and the second gRNA molecule include targeting domains comprising, e.g., consisting of, SEQ ID NO: 5708 and SEQ ID NO: 5507, respectively. In an aspect, the first gRNA molecule and the second gRNA molecule include targeting domains comprising, e.g., consisting of, SEQ ID NO: 5708 and SEQ ID NO: 5515, respectively. In an aspect, the first gRNA molecule and the second gRNA molecule include targeting domains comprising, e.g., consisting of, SEQ ID NO: 5708 and SEQ ID NO: 5493, respectively. In an aspect, the first gRNA molecule and the second gRNA molecule include targeting domains comprising, e.g., consisting of, SEQ ID NO: 5708 and SEQ ID NO: 5506, respectively. In an aspect, the first gRNA molecule and the second gRNA molecule include targeting domains comprising, e.g., consisting of, SEQ ID NO: 5708 and SEQ ID NO: 5509, respectively. In an aspect, the first gRNA molecule and the second gRNA molecule include targeting domains comprising, e.g., consisting of, SEQ ID NO: 5708 and SEQ ID NO: 5517, respectively. In an aspect, the first gRNA molecule and the second gRNA molecule include targeting domains comprising, e.g., consisting of, SEQ ID NO: 5708 and SEQ ID NO: 5521, respectively. In an aspect, the first gRNA molecule and the second gRNA molecule include targeting domains comprising, e.g., consisting of, SEQ ID NO: 5708 and SEQ ID NO: 5520, respectively. In an aspect, the first gRNA molecule and the second gRNA molecule include targeting domains comprising, e.g., consisting of, SEQ ID NO: 5708 and SEQ ID NO: 5500, respectively. In an aspect, the first gRNA molecule and the second gRNA molecule include targeting domains comprising, e.g., consisting of, SEQ ID NO: 5708 and SEQ ID NO: 5494, respectively. In an aspect, the first gRNA molecule and the second gRNA molecule include targeting domains comprising, e.g., consisting of, SEQ ID NO: 5708 and SEQ ID NO: 5508, respectively. In an aspect, the first gRNA molecule and the second gRNA molecule include targeting domains comprising, e.g., consisting of, SEQ ID NO: 5708 and SEQ ID NO: 5514, respectively. In an aspect, the first gRNA molecule and the second gRNA molecule include targeting domains comprising, e.g., consisting of, SEQ ID NO: 5708 and SEQ ID NO: 5492, respectively. In an aspect, the first gRNA molecule and the second gRNA molecule include targeting domains comprising, e.g., consisting of, SEQ ID NO: 5709 and SEQ ID NO: 5519, respectively. In an aspect, the first gRNA molecule and the second gRNA molecule include targeting domains comprising, e.g., consisting of, SEQ ID NO: 5709 and SEQ ID NO: 5497, respectively. In an aspect, the first gRNA molecule and the second gRNA molecule include targeting domains comprising, e.g., consisting of, SEQ ID NO: 5709 and SEQ ID NO: 5499, respectively. In an aspect, the first gRNA molecule and the second gRNA molecule include targeting domains comprising, e.g., consisting of, SEQ ID NO: 5709 and SEQ ID NO: 5498, respectively. In an aspect, the first gRNA molecule and the second gRNA molecule include targeting domains comprising, e.g., consisting of, SEQ ID NO: 5709 and SEQ ID NO: 5503, respectively. In an aspect, the first gRNA molecule and the second gRNA molecule include targeting domains comprising, e.g., consisting of, SEQ ID NO: 5709 and SEQ ID NO: 5496, respectively. In an aspect, the first gRNA molecule and the second gRNA molecule include targeting domains comprising, e.g., consisting of, SEQ ID NO: 5709 and SEQ ID NO: 5507, respectively. In an aspect, the first gRNA molecule and the second gRNA molecule include targeting domains comprising, e.g., consisting of, SEQ ID NO: 5709 and SEQ ID NO: 5515, respectively. In an aspect, the first gRNA molecule and the second gRNA molecule include targeting domains comprising, e.g., consisting of, SEQ ID NO: 5709 and SEQ ID NO: 5493, respectively. In an aspect, the first gRNA molecule and the second gRNA molecule include targeting domains comprising, e.g., consisting of, SEQ ID NO: 5709 and SEQ ID NO: 5506, respectively. In an aspect, the first gRNA molecule and the second gRNA molecule include targeting domains comprising, e.g., consisting of, SEQ ID NO: 5709 and SEQ ID NO: 5509, respectively. In an aspect, the first gRNA molecule and the second gRNA molecule include targeting domains comprising, e.g., consisting of, SEQ ID NO: 5709 and SEQ ID NO: 5517, respectively. In an aspect, the first gRNA molecule and the second gRNA molecule include targeting domains comprising, e.g., consisting of, SEQ ID NO: 5709 and SEQ ID NO: 5521, respectively. In an aspect, the first gRNA molecule and the second gRNA molecule include targeting domains comprising, e.g., consisting of, SEQ ID NO: 5709 and SEQ ID NO: 5520, respectively. In an aspect, the first gRNA molecule and the second gRNA molecule include targeting domains comprising, e.g., consisting of, SEQ ID NO: 5709 and SEQ ID NO: 5500, respectively. In an aspect, the first gRNA molecule and the second gRNA molecule include targeting domains comprising, e.g., consisting of, SEQ ID NO: 5709 and SEQ ID NO: 5494, respectively. In an aspect, the first gRNA molecule and the second gRNA molecule include targeting domains comprising, e.g., consisting of, SEQ ID NO: 5709 and SEQ ID NO: 5508, respectively. In an aspect, the first gRNA molecule and the second gRNA molecule include targeting domains comprising, e.g., consisting of, SEQ ID NO: 5709 and SEQ ID NO: 5514, respectively. In an aspect, the first gRNA molecule and the second gRNA molecule include targeting domains comprising, e.g., consisting of, SEQ ID NO: 5709 and SEQ ID NO: 5492, respectively. In an aspect, the first gRNA molecule and the second gRNA molecule include targeting domains comprising, e.g., consisting of, SEQ ID NO: 5712 and SEQ ID NO: 5519, respectively. In an aspect, the first gRNA molecule and the second gRNA molecule include targeting domains comprising, e.g., consisting of, SEQ ID NO: 5712 and SEQ ID NO: 5497, respectively. In an aspect, the first gRNA molecule and the second gRNA molecule include targeting domains comprising, e.g., consisting of, SEQ ID NO: 5712 and SEQ ID NO: 5499, respectively. In an aspect, the first gRNA molecule and the second gRNA molecule include targeting domains comprising, e.g., consisting of, SEQ ID NO: 5712 and SEQ ID NO: 5498, respectively. In an aspect, the first gRNA molecule and the second gRNA molecule include targeting domains comprising, e.g., consisting of, SEQ ID NO: 5712 and SEQ ID NO: 5503, respectively. In an aspect, the first gRNA molecule and the second gRNA molecule include targeting domains comprising, e.g., consisting of, SEQ ID NO: 5712 and SEQ ID NO: 5496, respectively. In an aspect, the first gRNA molecule and the second gRNA molecule include targeting domains comprising, e.g., consisting of, SEQ ID NO: 5712 and SEQ ID NO: 5507, respectively. In an aspect, the first gRNA molecule and the second gRNA molecule include targeting domains comprising, e.g., consisting of, SEQ ID NO: 5712 and SEQ ID NO: 5515, respectively. In an aspect, the first gRNA molecule and the second gRNA molecule include targeting domains comprising, e.g., consisting of, SEQ ID NO: 5712 and SEQ ID NO: 5493, respectively. In an aspect, the first gRNA molecule and the second gRNA molecule include targeting domains comprising, e.g., consisting of, SEQ ID NO: 5712 and SEQ ID NO: 5506, respectively. In an aspect, the first gRNA molecule and the second gRNA molecule include targeting domains comprising, e.g., consisting of, SEQ ID NO: 5712 and SEQ ID NO: 5509, respectively. In an aspect, the first gRNA molecule and the second gRNA molecule include targeting domains comprising, e.g., consisting of, SEQ ID NO: 5712 and SEQ ID NO: 5517, respectively. In an aspect, the first gRNA molecule and the second gRNA molecule include targeting domains comprising, e.g., consisting of, SEQ ID NO: 5712 and SEQ ID NO: 5521, respectively. In an aspect, the first gRNA molecule and the second gRNA molecule include targeting domains comprising, e.g., consisting of, SEQ ID NO: 5712 and SEQ ID NO: 5520, respectively. In an aspect, the first gRNA molecule and the second gRNA molecule include targeting domains comprising, e.g., consisting of, SEQ ID NO: 5712 and SEQ ID NO: 5500, respectively. In an aspect, the first gRNA molecule and the second gRNA molecule include targeting domains comprising, e.g., consisting of, SEQ ID NO: 5712 and SEQ ID NO: 5494, respectively. In an aspect, the first gRNA molecule and the second gRNA molecule include targeting domains comprising, e.g., consisting of, SEQ ID NO: 5712 and SEQ ID NO: 5508, respectively. In an aspect, the first gRNA molecule and the second gRNA molecule include targeting domains comprising, e.g., consisting of, SEQ ID NO: 5712 and SEQ ID NO: 5514, respectively. In an aspect, the first gRNA molecule and the second gRNA molecule include targeting domains comprising, e.g., consisting of, SEQ ID NO: 5712 and SEQ ID NO: 5492, respectively. In an aspect, the first gRNA molecule and the second gRNA molecule include targeting domains comprising, e.g., consisting of, SEQ ID NO: 5703 and SEQ ID NO: 5519, respectively. In an aspect, the first gRNA molecule and the second gRNA molecule include targeting domains comprising, e.g., consisting of, SEQ ID NO: 5703 and SEQ ID NO: 5497, respectively. In an aspect, the first gRNA molecule and the second gRNA molecule include targeting domains comprising, e.g., consisting of, SEQ ID NO: 5703 and SEQ ID NO: 5499, respectively. In an aspect, the first gRNA molecule and the second gRNA molecule include targeting domains comprising, e.g., consisting of, SEQ ID NO: 5703 and SEQ ID NO: 5498, respectively. In an aspect, the first gRNA molecule and the second gRNA molecule include targeting domains comprising, e.g., consisting of, SEQ ID NO: 5703 and SEQ ID NO: 5503, respectively. In an aspect, the first gRNA molecule and the second gRNA molecule include targeting domains comprising, e.g., consisting of, SEQ ID NO: 5703 and SEQ ID NO: 5496, respectively. In an aspect, the first gRNA molecule and the second gRNA molecule include targeting domains comprising, e.g., consisting of, SEQ ID NO: 5703 and SEQ ID NO: 5507, respectively. In an aspect, the first gRNA molecule and the second gRNA molecule include targeting domains comprising, e.g., consisting of, SEQ ID NO: 5703 and SEQ ID NO: 5515, respectively. In an aspect, the first gRNA molecule and the second gRNA molecule include targeting domains comprising, e.g., consisting of, SEQ ID NO: 5703 and SEQ ID NO: 5493, respectively. In an aspect, the first gRNA molecule and the second gRNA molecule include targeting domains comprising, e.g., consisting of, SEQ ID NO: 5703 and SEQ ID NO: 5506, respectively. In an aspect, the first gRNA molecule and the second gRNA molecule include targeting domains comprising, e.g., consisting of, SEQ ID NO: 5703 and SEQ ID NO: 5509, respectively. In an aspect, the first gRNA molecule and the second gRNA molecule include targeting domains comprising, e.g., consisting of, SEQ ID NO: 5703 and SEQ ID NO: 5517, respectively. In an aspect, the first gRNA molecule and the second gRNA molecule include targeting domains comprising, e.g., consisting of, SEQ ID NO: 5703 and SEQ ID NO: 5521, respectively. In an aspect, the first gRNA molecule and the second gRNA molecule include targeting domains comprising, e.g., consisting of, SEQ ID NO: 5703 and SEQ ID NO: 5520, respectively. In an aspect, the first gRNA molecule and the second gRNA molecule include targeting domains comprising, e.g., consisting of, SEQ ID NO: 5703 and SEQ ID NO: 5500, respectively. In an aspect, the first gRNA molecule and the second gRNA molecule include targeting domains comprising, e.g., consisting of, SEQ ID NO: 5703 and SEQ ID NO: 5494, respectively. In an aspect, the first gRNA molecule and the second gRNA molecule include targeting domains comprising, e.g., consisting of, SEQ ID NO: 5703 and SEQ ID NO: 5508, respectively. In an aspect, the first gRNA molecule and the second gRNA molecule include targeting domains comprising, e.g., consisting of, SEQ ID NO: 5703 and SEQ ID NO: 5514, respectively. In an aspect, the first gRNA molecule and the second gRNA molecule include targeting domains comprising, e.g., consisting of, SEQ ID NO: 5703 and SEQ ID NO: 5492, respectively. In an aspect, the first gRNA molecule and the second gRNA molecule include targeting domains comprising, e.g., consisting of, SEQ ID NO: 5707 and SEQ ID NO: 5519, respectively. In an aspect, the first gRNA molecule and the second gRNA molecule include targeting domains comprising, e.g., consisting of, SEQ ID NO: 5707 and SEQ ID NO: 5497, respectively. In an aspect, the first gRNA molecule and the second gRNA molecule include targeting domains comprising, e.g., consisting of, SEQ ID NO: 5707 and SEQ ID NO: 5499, respectively. In an aspect, the first gRNA molecule and the second gRNA molecule include targeting domains comprising, e.g., consisting of, SEQ ID NO: 5707 and SEQ ID NO: 5498, respectively. In an aspect, the first gRNA molecule and the second gRNA molecule include targeting domains comprising, e.g., consisting of, SEQ ID NO: 5707 and SEQ ID NO: 5503, respectively. In an aspect, the first gRNA molecule and the second gRNA molecule include targeting domains comprising, e.g., consisting of, SEQ ID NO: 5707 and SEQ ID NO: 5496, respectively. In an aspect, the first gRNA molecule and the second gRNA molecule include targeting domains comprising, e.g., consisting of, SEQ ID NO: 5707 and SEQ ID NO: 5507, respectively. In an aspect, the first gRNA molecule and the second gRNA molecule include targeting domains comprising, e.g., consisting of, SEQ ID NO: 5707 and SEQ ID NO: 5515, respectively. In an aspect, the first gRNA molecule and the second gRNA molecule include targeting domains comprising, e.g., consisting of, SEQ ID NO: 5707 and SEQ ID NO: 5493, respectively. In an aspect, the first gRNA molecule and the second gRNA molecule include targeting domains comprising, e.g., consisting of, SEQ ID NO: 5707 and SEQ ID NO: 5506, respectively. In an aspect, the first gRNA molecule and the second gRNA molecule include targeting domains comprising, e.g., consisting of, SEQ ID NO: 5707 and SEQ ID NO: 5509, respectively. In an aspect, the first gRNA molecule and the second gRNA molecule include targeting domains comprising, e.g., consisting of, SEQ ID NO: 5707 and SEQ ID NO: 5517, respectively. In an aspect, the first gRNA molecule and the second gRNA molecule include targeting domains comprising, e.g., consisting of, SEQ ID NO: 5707 and SEQ ID NO: 5521, respectively. In an aspect, the first gRNA molecule and the second gRNA molecule include targeting domains comprising, e.g., consisting of, SEQ ID NO: 5707 and SEQ ID NO: 5520, respectively. In an aspect, the first gRNA molecule and the second gRNA molecule include targeting domains comprising, e.g., consisting of, SEQ ID NO: 5707 and SEQ ID NO: 5500, respectively. In an aspect, the first gRNA molecule and the second gRNA molecule include targeting domains comprising, e.g., consisting of, SEQ ID NO: 5707 and SEQ ID NO: 5494, respectively. In an aspect, the first gRNA molecule and the second gRNA molecule include targeting domains comprising, e.g., consisting of, SEQ ID NO: 5707 and SEQ ID NO: 5508, respectively. In an aspect, the first gRNA molecule and the second gRNA molecule include targeting domains comprising, e.g., consisting of, SEQ ID NO: 5707 and SEQ ID NO: 5514, respectively. In an aspect, the first gRNA molecule and the second gRNA molecule include targeting domains comprising, e.g., consisting of, SEQ ID NO: 5707 and SEQ ID NO: 5492, respectively. In an aspect, the first gRNA molecule and the second gRNA molecule include targeting domains comprising, e.g., consisting of, SEQ ID NO: 5687 and SEQ ID NO: 5519, respectively. In an aspect, the first gRNA molecule and the second gRNA molecule include targeting domains comprising, e.g., consisting of, SEQ ID NO: 5687 and SEQ ID NO: 5497, respectively. In an aspect, the first gRNA molecule and the second gRNA molecule include targeting domains comprising, e.g., consisting of, SEQ ID NO: 5687 and SEQ ID NO: 5499, respectively. In an aspect, the first gRNA molecule and the second gRNA molecule include targeting domains comprising, e.g., consisting of, SEQ ID NO: 5687 and SEQ ID NO: 5498, respectively. In an aspect, the first gRNA molecule and the second gRNA molecule include targeting domains comprising, e.g., consisting of, SEQ ID NO: 5687 and SEQ ID NO: 5503, respectively. In an aspect, the first gRNA molecule and the second gRNA molecule include targeting domains comprising, e.g., consisting of, SEQ ID NO: 5687 and SEQ ID NO: 5496, respectively. In an aspect, the first gRNA molecule and the second gRNA molecule include targeting domains comprising, e.g., consisting of, SEQ ID NO: 5687 and SEQ ID NO: 5507, respectively. In an aspect, the first gRNA molecule and the second gRNA molecule include targeting domains comprising, e.g., consisting of, SEQ ID NO: 5687 and SEQ ID NO: 5515, respectively. In an aspect, the first gRNA molecule and the second gRNA molecule include targeting domains comprising, e.g., consisting of, SEQ ID NO: 5687 and SEQ ID NO: 5493, respectively. In an aspect, the first gRNA molecule and the second gRNA molecule include targeting domains comprising, e.g., consisting of, SEQ ID NO: 5687 and SEQ ID NO: 5506, respectively. In an aspect, the first gRNA molecule and the second gRNA molecule include targeting domains comprising, e.g., consisting of, SEQ ID NO: 5687 and SEQ ID NO: 5509, respectively. In an aspect, the first gRNA molecule and the second gRNA molecule include targeting domains comprising, e.g., consisting of, SEQ ID NO: 5687 and SEQ ID NO: 5517, respectively. In an aspect, the first gRNA molecule and the second gRNA molecule include targeting domains comprising, e.g., consisting of, SEQ ID NO: 5687 and SEQ ID NO: 5521, respectively. In an aspect, the first gRNA molecule and the second gRNA molecule include targeting domains comprising, e.g., consisting of, SEQ ID NO: 5687 and SEQ ID NO: 5520, respectively. In an aspect, the first gRNA molecule and the second gRNA molecule include targeting domains comprising, e.g., consisting of, SEQ ID NO: 5687 and SEQ ID NO: 5500, respectively. In an aspect, the first gRNA molecule and the second gRNA molecule include targeting domains comprising, e.g., consisting of, SEQ ID NO: 5687 and SEQ ID NO: 5494, respectively. In an aspect, the first gRNA molecule and the second gRNA molecule include targeting domains comprising, e.g., consisting of, SEQ ID NO: 5687 and SEQ ID NO: 5508, respectively. In an aspect, the first gRNA molecule and the second gRNA molecule include targeting domains comprising, e.g., consisting of, SEQ ID NO: 5687 and SEQ ID NO: 5514, respectively. In an aspect, the first gRNA molecule and the second gRNA molecule include targeting domains comprising, e.g., consisting of, SEQ ID NO: 5687 and SEQ ID NO: 5492, respectively. In an aspect, the first gRNA molecule and the second gRNA molecule include targeting domains comprising, e.g., consisting of, SEQ ID NO: 5705 and SEQ ID NO: 5519, respectively. In an aspect, the first gRNA molecule and the second gRNA molecule include targeting domains comprising, e.g., consisting of, SEQ ID NO: 5705 and SEQ ID NO: 5497, respectively. In an aspect, the first gRNA molecule and the second gRNA molecule include targeting domains comprising, e.g., consisting of, SEQ ID NO: 5705 and SEQ ID NO: 5499, respectively. In an aspect, the first gRNA molecule and the second gRNA molecule include targeting domains comprising, e.g., consisting of, SEQ ID NO: 5705 and SEQ ID NO: 5498, respectively. In an aspect, the first gRNA molecule and the second gRNA molecule include targeting domains comprising, e.g., consisting of, SEQ ID NO: 5705 and SEQ ID NO: 5503, respectively. In an aspect, the first gRNA molecule and the second gRNA molecule include targeting domains comprising, e.g., consisting of, SEQ ID NO: 5705 and SEQ ID NO: 5496, respectively. In an aspect, the first gRNA molecule and the second gRNA molecule include targeting domains comprising, e.g., consisting of, SEQ ID NO: 5705 and SEQ ID NO: 5507, respectively. In an aspect, the first gRNA molecule and the second gRNA molecule include targeting domains comprising, e.g., consisting of, SEQ ID NO: 5705 and SEQ ID NO: 5515, respectively. In an aspect, the first gRNA molecule and the second gRNA molecule include targeting domains comprising, e.g., consisting of, SEQ ID NO: 5705 and SEQ ID NO: 5493, respectively. In an aspect, the first gRNA molecule and the second gRNA molecule include targeting domains comprising, e.g., consisting of, SEQ ID NO: 5705 and SEQ ID NO: 5506, respectively. In an aspect, the first gRNA molecule and the second gRNA molecule include targeting domains comprising, e.g., consisting of, SEQ ID NO: 5705 and SEQ ID NO: 5509, respectively. In an aspect, the first gRNA molecule and the second gRNA molecule include targeting domains comprising, e.g., consisting of, SEQ ID NO: 5705 and SEQ ID NO: 5517, respectively. In an aspect, the first gRNA molecule and the second gRNA molecule include targeting domains comprising, e.g., consisting of, SEQ ID NO: 5705 and SEQ ID NO: 5521, respectively. In an aspect, the first gRNA molecule and the second gRNA molecule include targeting domains comprising, e.g., consisting of, SEQ ID NO: 5705 and SEQ ID NO: 5520, respectively. In an aspect, the first gRNA molecule and the second gRNA molecule include targeting domains comprising, e.g., consisting of, SEQ ID NO: 5705 and SEQ ID NO: 5500, respectively. In an aspect, the first gRNA molecule and the second gRNA molecule include targeting domains comprising, e.g., consisting of, SEQ ID NO: 5705 and SEQ ID NO: 5494, respectively. In an aspect, the first gRNA molecule and the second gRNA molecule include targeting domains comprising, e.g., consisting of, SEQ ID NO: 5705 and SEQ ID NO: 5508, respectively. In an aspect, the first gRNA molecule and the second gRNA molecule include targeting domains comprising, e.g., consisting of, SEQ ID NO: 5705 and SEQ ID NO: 5514, respectively. In an aspect, the first gRNA molecule and the second gRNA molecule include targeting domains comprising, e.g., consisting of, SEQ ID NO: 5705 and SEQ ID NO: 5492, respectively. In an aspect, the first gRNA molecule and the second gRNA molecule include targeting domains comprising, e.g., consisting of, SEQ ID NO: 5713 and SEQ ID NO: 5519, respectively. In an aspect, the first gRNA molecule and the second gRNA molecule include targeting domains comprising, e.g., consisting of, SEQ ID NO: 5713 and SEQ ID NO: 5497, respectively. In an aspect, the first gRNA molecule and the second gRNA molecule include targeting domains comprising, e.g., consisting of, SEQ ID NO: 5713 and SEQ ID NO: 5499, respectively. In an aspect, the first gRNA molecule and the second gRNA molecule include targeting domains comprising, e.g., consisting of, SEQ ID NO: 5713 and SEQ ID NO: 5498, respectively. In an aspect, the first gRNA molecule and the second gRNA molecule include targeting domains comprising, e.g., consisting of, SEQ ID NO: 5713 and SEQ ID NO: 5503, respectively. In an aspect, the first gRNA molecule and the second gRNA molecule include targeting domains comprising, e.g., consisting of, SEQ ID NO: 5713 and SEQ ID NO: 5496, respectively. In an aspect, the first gRNA molecule and the second gRNA molecule include targeting domains comprising, e.g., consisting of, SEQ ID NO: 5713 and SEQ ID NO: 5507, respectively. In an aspect, the first gRNA molecule and the second gRNA molecule include targeting domains comprising, e.g., consisting of, SEQ ID NO: 5713 and SEQ ID NO: 5515, respectively. In an aspect, the first gRNA molecule and the second gRNA molecule include targeting domains comprising, e.g., consisting of, SEQ ID NO: 5713 and SEQ ID NO: 5493, respectively. In an aspect, the first gRNA molecule and the second gRNA molecule include targeting domains comprising, e.g., consisting of, SEQ ID NO: 5713 and SEQ ID NO: 5506, respectively. In an aspect, the first gRNA molecule and the second gRNA molecule include targeting domains comprising, e.g., consisting of, SEQ ID NO: 5713 and SEQ ID NO: 5509, respectively. In an aspect, the first gRNA molecule and the second gRNA molecule include targeting domains comprising, e.g., consisting of, SEQ ID NO: 5713 and SEQ ID NO: 5517, respectively. In an aspect, the first gRNA molecule and the second gRNA molecule include targeting domains comprising, e.g., consisting of, SEQ ID NO: 5713 and SEQ ID NO: 5521, respectively. In an aspect, the first gRNA molecule and the second gRNA molecule include targeting domains comprising, e.g., consisting of, SEQ ID NO: 5713 and SEQ ID NO: 5520, respectively. In an aspect, the first gRNA molecule and the second gRNA molecule include targeting domains comprising, e.g., consisting of, SEQ ID NO: 5713 and SEQ ID NO: 5500, respectively. In an aspect, the first gRNA molecule and the second gRNA molecule include targeting domains comprising, e.g., consisting of, SEQ ID NO: 5713 and SEQ ID NO: 5494, respectively. In an aspect, the first gRNA molecule and the second gRNA molecule include targeting domains comprising, e.g., consisting of, SEQ ID NO: 5713 and SEQ ID NO: 5508, respectively. In an aspect, the first gRNA molecule and the second gRNA molecule include targeting domains comprising, e.g., consisting of, SEQ ID NO: 5713 and SEQ ID NO: 5514, respectively. In an aspect, the first gRNA molecule and the second gRNA molecule include targeting domains comprising, e.g., consisting of, SEQ ID NO: 5713 and SEQ ID NO: 5492, respectively. In an aspect, the first gRNA molecule and the second gRNA molecule include targeting domains comprising, e.g., consisting of, SEQ ID NO: 5715 and SEQ ID NO: 5519, respectively. In an aspect, the first gRNA molecule and the second gRNA molecule include targeting domains comprising, e.g., consisting of, SEQ ID NO: 5715 and SEQ ID NO: 5497, respectively. In an aspect, the first gRNA molecule and the second gRNA molecule include targeting domains comprising, e.g., consisting of, SEQ ID NO: 5715 and SEQ ID NO: 5499, respectively. In an aspect, the first gRNA molecule and the second gRNA molecule include targeting domains comprising, e.g., consisting of, SEQ ID NO: 5715 and SEQ ID NO: 5498, respectively. In an aspect, the first gRNA molecule and the second gRNA molecule include targeting domains comprising, e.g., consisting of, SEQ ID NO: 5715 and SEQ ID NO: 5503, respectively. In an aspect, the first gRNA molecule and the second gRNA molecule include targeting domains comprising, e.g., consisting of, SEQ ID NO: 5715 and SEQ ID NO: 5496, respectively. In an aspect, the first gRNA molecule and the second gRNA molecule include targeting domains comprising, e.g., consisting of, SEQ ID NO: 5715 and SEQ ID NO: 5507, respectively. In an aspect, the first gRNA molecule and the second gRNA molecule include targeting domains comprising, e.g., consisting of, SEQ ID NO: 5715 and SEQ ID NO: 5515, respectively. In an aspect, the first gRNA molecule and the second gRNA molecule include targeting domains comprising, e.g., consisting of, SEQ ID NO: 5715 and SEQ ID NO: 5493, respectively. In an aspect, the first gRNA molecule and the second gRNA molecule include targeting domains comprising, e.g., consisting of, SEQ ID NO: 5715 and SEQ ID NO: 5506, respectively. In an aspect, the first gRNA molecule and the second gRNA molecule include targeting domains comprising, e.g., consisting of, SEQ ID NO: 5715 and SEQ ID NO: 5509, respectively. In an aspect, the first gRNA molecule and the second gRNA molecule include targeting domains comprising, e.g., consisting of, SEQ ID NO: 5715 and SEQ ID NO: 5517, respectively. In an aspect, the first gRNA molecule and the second gRNA molecule include targeting domains comprising, e.g., consisting of, SEQ ID NO: 5715 and SEQ ID NO: 5521, respectively. In an aspect, the first gRNA molecule and the second gRNA molecule include targeting domains comprising, e.g., consisting of, SEQ ID NO: 5715 and SEQ ID NO: 5520, respectively. In an aspect, the first gRNA molecule and the second gRNA molecule include targeting domains comprising, e.g., consisting of, SEQ ID NO: 5715 and SEQ ID NO: 5500, respectively. In an aspect, the first gRNA molecule and the second gRNA molecule include targeting domains comprising, e.g., consisting of, SEQ ID NO: 5715 and SEQ ID NO: 5494, respectively. In an aspect, the first gRNA molecule and the second gRNA molecule include targeting domains comprising, e.g., consisting of, SEQ ID NO: 5715 and SEQ ID NO: 5508, respectively. In an aspect, the first gRNA molecule and the second gRNA molecule include targeting domains comprising, e.g., consisting of, SEQ ID NO: 5715 and SEQ ID NO: 5514, respectively. In an aspect, the first gRNA molecule and the second gRNA molecule include targeting domains comprising, e.g., consisting of, SEQ ID NO: 5715 and SEQ ID NO: 5492, respectively. In an aspect, the first gRNA molecule and the second gRNA molecule include targeting domains comprising, e.g., consisting of, SEQ ID NO: 5710 and SEQ ID NO: 5519, respectively. In an aspect, the first gRNA molecule and the second gRNA molecule include targeting domains comprising, e.g., consisting of, SEQ ID NO: 5710 and SEQ ID NO: 5497, respectively. In an aspect, the first gRNA molecule and the second gRNA molecule include targeting domains comprising, e.g., consisting of, SEQ ID NO: 5710 and SEQ ID NO: 5499, respectively. In an aspect, the first gRNA molecule and the second gRNA molecule include targeting domains comprising, e.g., consisting of, SEQ ID NO: 5710 and SEQ ID NO: 5498, respectively. In an aspect, the first gRNA molecule and the second gRNA molecule include targeting domains comprising, e.g., consisting of, SEQ ID NO: 5710 and SEQ ID NO: 5503, respectively. In an aspect, the first gRNA molecule and the second gRNA molecule include targeting domains comprising, e.g., consisting of, SEQ ID NO: 5710 and SEQ ID NO: 5496, respectively. In an aspect, the first gRNA molecule and the second gRNA molecule include targeting domains comprising, e.g., consisting of, SEQ ID NO: 5710 and SEQ ID NO: 5507, respectively. In an aspect, the first gRNA molecule and the second gRNA molecule include targeting domains comprising, e.g., consisting of, SEQ ID NO: 5710 and SEQ ID NO: 5515, respectively. In an aspect, the first gRNA molecule and the second gRNA molecule include targeting domains comprising, e.g., consisting of, SEQ ID NO: 5710 and SEQ ID NO: 5493, respectively. In an aspect, the first gRNA molecule and the second gRNA molecule include targeting domains comprising, e.g., consisting of, SEQ ID NO: 5710 and SEQ ID NO: 5506, respectively. In an aspect, the first gRNA molecule and the second gRNA molecule include targeting domains comprising, e.g., consisting of, SEQ ID NO: 5710 and SEQ ID NO: 5509, respectively. In an aspect, the first gRNA molecule and the second gRNA molecule include targeting domains comprising, e.g., consisting of, SEQ ID NO: 5710 and SEQ ID NO: 5517, respectively. In an aspect, the first gRNA molecule and the second gRNA molecule include targeting domains comprising, e.g., consisting of, SEQ ID NO: 5710 and SEQ ID NO: 5521, respectively. In an aspect, the first gRNA molecule and the second gRNA molecule include targeting domains comprising, e.g., consisting of, SEQ ID NO: 5710 and SEQ ID NO: 5520, respectively. In an aspect, the first gRNA molecule and the second gRNA molecule include targeting domains comprising, e.g., consisting of, SEQ ID NO: 5710 and SEQ ID NO: 5500, respectively. In an aspect, the first gRNA molecule and the second gRNA molecule include targeting domains comprising, e.g., consisting of, SEQ ID NO: 5710 and SEQ ID NO: 5494, respectively. In an aspect, the first gRNA molecule and the second gRNA molecule include targeting domains comprising, e.g., consisting of, SEQ ID NO: 5710 and SEQ ID NO: 5508, respectively. In an aspect, the first gRNA molecule and the second gRNA molecule include targeting domains comprising, e.g., consisting of, SEQ ID NO: 5710 and SEQ ID NO: 5514, respectively. In an aspect, the first gRNA molecule and the second gRNA molecule include targeting domains comprising, e.g., consisting of, SEQ ID NO: 5710 and SEQ ID NO: 5492, respectively. In any of the aforementioned combinations, the aspect or the embodiment of the invention may additionally include a third gRNA molecule (or more than one gRNA molecules) comprising a targeting domain specific for a sequence of CIITA, e.g. as described herein, e.g., as described herein in Table 6c.

[1154] In aspects of the invention that utilize two or more, e.g., two, gRNA molecules, it may be particularly useful for a first gRNA molecule to comprise a targeting domain specific for a sequence of TRAC and a second gRNA molecule to comprise a targeting domain specific for a sequence of PDCD1. In such aspects, it is particularly preferred that the first gRNA molecule to TRAC comprises a targeting domain of any gRNA molecule of FIG. 12, and the second gRNA molecule to PDCD1 comprises a targeting domain of any gRNA molecule of FIG. 16. In an aspect, the first gRNA molecule and the second gRNA molecule include targeting domains comprising, e.g., consisting of, SEQ ID NO: 5569 and SEQ ID NO: 5743, respectively. In an aspect, the first gRNA molecule and the second gRNA molecule include targeting domains comprising, e.g., consisting of, SEQ ID NO: 5569 and SEQ ID NO: 5497, respectively. In an aspect, the first gRNA molecule and the second gRNA molecule include targeting domains comprising, e.g., consisting of, SEQ ID NO: 5569 and SEQ ID NO: 5499, respectively. In an aspect, the first gRNA molecule and the second gRNA molecule include targeting domains comprising, e.g., consisting of, SEQ ID NO: 5569 and SEQ ID NO: 5498, respectively. In an aspect, the first gRNA molecule and the second gRNA molecule include targeting domains comprising, e.g., consisting of, SEQ ID NO: 5569 and SEQ ID NO: 5503, respectively. In an aspect, the first gRNA molecule and the second gRNA molecule include targeting domains comprising, e.g., consisting of, SEQ ID NO: 5569 and SEQ ID NO: 5496, respectively. In an aspect, the first gRNA molecule and the second gRNA molecule include targeting domains comprising, e.g., consisting of, SEQ ID NO: 5569 and SEQ ID NO: 5507, respectively. In an aspect, the first gRNA molecule and the second gRNA molecule include targeting domains comprising, e.g., consisting of, SEQ ID NO: 5569 and SEQ ID NO: 5515, respectively. In an aspect, the first gRNA molecule and the second gRNA molecule include targeting domains comprising, e.g., consisting of, SEQ ID NO: 5569 and SEQ ID NO: 5493, respectively. In an aspect, the first gRNA molecule and the second gRNA molecule include targeting domains comprising, e.g., consisting of, SEQ ID NO: 5569 and SEQ ID NO: 5506, respectively. In an aspect, the first gRNA molecule and the second gRNA molecule include targeting domains comprising, e.g., consisting of, SEQ ID NO: 5569 and SEQ ID NO: 5509, respectively. In an aspect, the first gRNA molecule and the second gRNA molecule include targeting domains comprising, e.g., consisting of, SEQ ID NO: 5569 and SEQ ID NO: 5517, respectively. In an aspect, the first gRNA molecule and the second gRNA molecule include targeting domains comprising, e.g., consisting of, SEQ ID NO: 5569 and SEQ ID NO: 5521, respectively. In an aspect, the first gRNA molecule and the second gRNA molecule include targeting domains comprising, e.g., consisting of, SEQ ID NO: 5569 and SEQ ID NO: 5520, respectively. In an aspect, the first gRNA molecule and the second gRNA molecule include targeting domains comprising, e.g., consisting of, SEQ ID NO: 5569 and SEQ ID NO: 5500, respectively. In an aspect, the first gRNA molecule and the second gRNA molecule include targeting domains comprising, e.g., consisting of, SEQ ID NO: 5585 and SEQ ID NO: 5743, respectively. In an aspect, the first gRNA molecule and the second gRNA molecule include targeting domains comprising, e.g., consisting of, SEQ ID NO: 5585 and SEQ ID NO: 5798, respectively. In an aspect, the first gRNA molecule and the second gRNA molecule include targeting domains comprising, e.g., consisting of, SEQ ID NO: 5585 and SEQ ID NO: 5748, respectively. In an aspect, the first gRNA molecule and the second gRNA molecule include targeting domains comprising, e.g., consisting of, SEQ ID NO: 5585 and SEQ ID NO: 5722, respectively. In an aspect, the first gRNA molecule and the second gRNA molecule include targeting domains comprising, e.g., consisting of, SEQ ID NO: 5585 and SEQ ID NO: 5800, respectively. In an aspect, the first gRNA molecule and the second gRNA molecule include targeting domains comprising, e.g., consisting of, SEQ ID NO: 5585 and SEQ ID NO: 5735, respectively. In an aspect, the first gRNA molecule and the second gRNA molecule include targeting domains comprising, e.g., consisting of, SEQ ID NO: 5585 and SEQ ID NO: 5724, respectively. In an aspect, the first gRNA molecule and the second gRNA molecule include targeting domains comprising, e.g., consisting of, SEQ ID NO: 5585 and SEQ ID NO: 5731, respectively. In an aspect, the first gRNA molecule and the second gRNA molecule include targeting domains comprising, e.g., consisting of, SEQ ID NO: 5585 and SEQ ID NO: 5725, respectively. In an aspect, the first gRNA molecule and the second gRNA molecule include targeting domains comprising, e.g., consisting of, SEQ ID NO: 5585 and SEQ ID NO: 5775, respectively. In an aspect, the first gRNA molecule and the second gRNA molecule include targeting domains comprising, e.g., consisting of, SEQ ID NO: 5585 and SEQ ID NO: 5766, respectively. In an aspect, the first gRNA molecule and the second gRNA molecule include targeting domains comprising, e.g., consisting of, SEQ ID NO: 5585 and SEQ ID NO: 5727, respectively. In an aspect, the first gRNA molecule and the second gRNA molecule include targeting domains comprising, e.g., consisting of, SEQ ID NO: 5585 and SEQ ID NO: 5744, respectively. In an aspect, the first gRNA molecule and the second gRNA molecule include targeting domains comprising, e.g., consisting of, SEQ ID NO: 5585 and SEQ ID NO: 5751, respectively. In an aspect, the first gRNA molecule and the second gRNA molecule include targeting domains comprising, e.g., consisting of, SEQ ID NO: 5585 and SEQ ID NO: 5734, respectively. In an aspect, the first gRNA molecule and the second gRNA molecule include targeting domains comprising, e.g., consisting of, SEQ ID NO: 5592 and SEQ ID NO: 5743, respectively. In an aspect, the first gRNA molecule and the second gRNA molecule include targeting domains comprising, e.g., consisting of, SEQ ID NO: 5592 and SEQ ID NO: 5798, respectively. In an aspect, the first gRNA molecule and the second gRNA molecule include targeting domains comprising, e.g., consisting of, SEQ ID NO: 5592 and SEQ ID NO: 5748, respectively. In an aspect, the first gRNA molecule and the second gRNA molecule include targeting domains comprising, e.g., consisting of, SEQ ID NO: 5592 and SEQ ID NO: 5722, respectively. In an aspect, the first gRNA molecule and the second gRNA molecule include targeting domains comprising, e.g., consisting of, SEQ ID NO: 5592 and SEQ ID NO: 5800, respectively. In an aspect, the first gRNA molecule and the second gRNA molecule include targeting domains comprising, e.g., consisting of, SEQ ID NO: 5592 and SEQ ID NO: 5735, respectively. In an aspect, the first gRNA molecule and the second gRNA molecule include targeting domains comprising, e.g., consisting of, SEQ ID NO: 5592 and SEQ ID NO: 5724, respectively. In an aspect, the first gRNA molecule and the second gRNA molecule include targeting domains comprising, e.g., consisting of, SEQ ID NO: 5592 and SEQ ID NO: 5731, respectively. In an aspect, the first gRNA molecule and the second gRNA molecule include targeting domains comprising, e.g., consisting of, SEQ ID NO: 5592 and SEQ ID NO: 5725, respectively. In an aspect, the first gRNA molecule and the second gRNA molecule include targeting domains comprising, e.g., consisting of, SEQ ID NO: 5592 and SEQ ID NO: 5775, respectively. In an aspect, the first gRNA molecule and the second gRNA molecule include targeting domains comprising, e.g., consisting of, SEQ ID NO: 5592 and SEQ ID NO: 5766, respectively. In an aspect, the first gRNA molecule and the second gRNA molecule include targeting domains comprising, e.g., consisting of, SEQ ID NO: 5592 and SEQ ID NO: 5727, respectively. In an aspect, the first gRNA molecule and the second gRNA molecule include targeting domains comprising, e.g., consisting of, SEQ ID NO: 5592 and SEQ ID NO: 5744, respectively. In an aspect, the first gRNA molecule and the second gRNA molecule include targeting domains comprising, e.g., consisting of, SEQ ID NO: 5592 and SEQ ID NO: 5751, respectively. In an aspect, the first gRNA molecule and the second gRNA molecule include targeting domains comprising, e.g., consisting of, SEQ ID NO: 5592 and SEQ ID NO: 5734, respectively. In an aspect, the first gRNA molecule and the second gRNA molecule include targeting domains comprising, e.g., consisting of, SEQ ID NO: 5601 and SEQ ID NO: 5743, respectively. In an aspect, the first gRNA molecule and the second gRNA molecule include targeting domains comprising, e.g., consisting of, SEQ ID NO: 5601 and SEQ ID NO: 5798, respectively. In an aspect, the first gRNA molecule and the second gRNA molecule include targeting domains comprising, e.g., consisting of, SEQ ID NO: 5601 and SEQ ID NO: 5748, respectively. In an aspect, the first gRNA molecule and the second gRNA molecule include targeting domains comprising, e.g., consisting of, SEQ ID NO: 5601 and SEQ ID NO: 5722, respectively. In an aspect, the first gRNA molecule and the second gRNA molecule include targeting domains comprising, e.g., consisting of, SEQ ID NO: 5601 and SEQ ID NO: 5800, respectively. In an aspect, the first gRNA molecule and the second gRNA molecule include targeting domains comprising, e.g., consisting of, SEQ ID NO: 5601 and SEQ ID NO: 5735, respectively. In an aspect, the first gRNA molecule and the second gRNA molecule include targeting domains comprising, e.g., consisting of, SEQ ID NO: 5601 and SEQ ID NO: 5724, respectively. In an aspect, the first gRNA molecule and the second gRNA molecule include targeting domains comprising, e.g., consisting of, SEQ ID NO: 5601 and SEQ ID NO: 5731, respectively. In an aspect, the first gRNA molecule and the second gRNA molecule include targeting domains comprising, e.g., consisting of, SEQ ID NO: 5601 and SEQ ID NO: 5725, respectively. In an aspect, the first gRNA molecule and the second gRNA molecule include targeting domains comprising, e.g., consisting of, SEQ ID NO: 5601 and SEQ ID NO: 5775, respectively. In an aspect, the first gRNA molecule and the second gRNA molecule include targeting domains comprising, e.g., consisting of, SEQ ID NO: 5601 and SEQ ID NO: 5766, respectively. In an aspect, the first gRNA molecule and the second gRNA molecule include targeting domains comprising, e.g., consisting of, SEQ ID NO: 5601 and SEQ ID NO: 5727, respectively. In an aspect, the first gRNA molecule and the second gRNA molecule include targeting domains comprising, e.g., consisting of, SEQ ID NO: 5601 and SEQ ID NO: 5744, respectively. In an aspect, the first gRNA molecule and the second gRNA molecule include targeting domains comprising, e.g., consisting of, SEQ ID NO: 5601 and SEQ ID NO: 5751, respectively. In an aspect, the first gRNA molecule and the second gRNA molecule include targeting domains comprising, e.g., consisting of, SEQ ID NO: 5601 and SEQ ID NO: 5734, respectively. In an aspect, the first gRNA molecule and the second gRNA molecule include targeting domains comprising, e.g., consisting of, SEQ ID NO: 5589 and SEQ ID NO: 5743, respectively. In an aspect, the first gRNA molecule and the second gRNA molecule include targeting domains comprising, e.g., consisting of, SEQ ID NO: 5589 and SEQ ID NO: 5798, respectively. In an aspect, the first gRNA molecule and the second gRNA molecule include targeting domains comprising, e.g., consisting of, SEQ ID NO: 5589 and SEQ ID NO: 5748, respectively. In an aspect, the first gRNA molecule and the second gRNA molecule include targeting domains comprising, e.g., consisting of, SEQ ID NO: 5589 and SEQ ID NO: 5722, respectively. In an aspect, the first gRNA molecule and the second gRNA molecule include targeting domains comprising, e.g., consisting of, SEQ ID NO: 5589 and SEQ ID NO: 5800, respectively. In an aspect, the first gRNA molecule and the second gRNA molecule include targeting domains comprising, e.g., consisting of, SEQ ID NO: 5589 and SEQ ID NO: 5735, respectively. In an aspect, the first gRNA molecule and the second gRNA molecule include targeting domains comprising, e.g., consisting of, SEQ ID NO: 5589 and SEQ ID NO: 5724, respectively. In an aspect, the first gRNA molecule and the second gRNA molecule include targeting domains comprising, e.g., consisting of, SEQ ID NO: 5589 and SEQ ID NO: 5731, respectively. In an aspect, the first gRNA molecule and the second gRNA molecule include targeting domains comprising, e.g., consisting of, SEQ ID NO: 5589 and SEQ ID NO: 5725, respectively. In an aspect, the first gRNA molecule and the second gRNA molecule include targeting domains comprising, e.g., consisting of, SEQ ID NO: 5589 and SEQ ID NO: 5775, respectively. In an aspect, the first gRNA molecule and the second gRNA molecule include targeting domains comprising, e.g., consisting of, SEQ ID NO: 5589 and SEQ ID NO: 5766, respectively. In an aspect, the first gRNA molecule and the second gRNA molecule include targeting domains comprising, e.g., consisting of, SEQ ID NO: 5589 and SEQ ID NO: 5727, respectively. In an aspect, the first gRNA molecule and the second gRNA molecule include targeting domains comprising, e.g., consisting of, SEQ ID NO: 5589 and SEQ ID NO: 5744, respectively. In an aspect, the first gRNA molecule and the second gRNA molecule include targeting domains comprising, e.g., consisting of, SEQ ID NO: 5589 and SEQ ID NO: 5751, respectively. In an aspect, the first gRNA molecule and the second gRNA molecule include targeting domains comprising, e.g., consisting of, SEQ ID NO: 5589 and SEQ ID NO: 5734, respectively. In an aspect, the first gRNA molecule and the second gRNA molecule include targeting domains comprising, e.g., consisting of, SEQ ID NO: 5600 and SEQ ID NO: 5743, respectively. In an aspect, the first gRNA molecule and the second gRNA molecule include targeting domains comprising, e.g., consisting of, SEQ ID NO: 5600 and SEQ ID NO: 5798, respectively. In an aspect, the first gRNA molecule and the second gRNA molecule include targeting domains comprising, e.g., consisting of, SEQ ID NO: 5600 and SEQ ID NO: 5748, respectively. In an aspect, the first gRNA molecule and the second gRNA molecule include targeting domains comprising, e.g., consisting of, SEQ ID NO: 5600 and SEQ ID NO: 5722, respectively. In an aspect, the first gRNA molecule and the second gRNA molecule include targeting domains comprising, e.g., consisting of, SEQ ID NO: 5600 and SEQ ID NO: 5800, respectively. In an aspect, the first gRNA molecule and the second gRNA molecule include targeting domains comprising, e.g., consisting of, SEQ ID NO: 5600 and SEQ ID NO: 5735, respectively. In an aspect, the first gRNA molecule and the second gRNA molecule include targeting domains comprising, e.g., consisting of, SEQ ID NO: 5600 and SEQ ID NO: 5724, respectively. In an aspect, the first gRNA molecule and the second gRNA molecule include targeting domains comprising, e.g., consisting of, SEQ ID NO: 5600 and SEQ ID NO: 5731, respectively. In an aspect, the first gRNA molecule and the second gRNA molecule include targeting domains comprising, e.g., consisting of, SEQ ID NO: 5600 and SEQ ID NO: 5725, respectively. In an aspect, the first gRNA molecule and the second gRNA molecule include targeting domains comprising, e.g., consisting of, SEQ ID NO: 5600 and SEQ ID NO: 5775, respectively. In an aspect, the first gRNA molecule and the second gRNA molecule include targeting domains comprising, e.g., consisting of, SEQ ID NO: 5600 and SEQ ID NO: 5766, respectively. In an aspect, the first gRNA molecule and the second gRNA molecule include targeting domains comprising, e.g., consisting of, SEQ ID NO: 5600 and SEQ ID NO: 5727, respectively. In an aspect, the first gRNA molecule and the second gRNA molecule include targeting domains comprising, e.g., consisting of, SEQ ID NO: 5600 and SEQ ID NO: 5744, respectively. In an aspect, the first gRNA molecule and the second gRNA molecule include targeting domains comprising, e.g., consisting of, SEQ ID NO: 5600 and SEQ ID NO: 5751, respectively. In an aspect, the first gRNA molecule and the second gRNA molecule include targeting domains comprising, e.g., consisting of, SEQ ID NO: 5600 and SEQ ID NO: 5734, respectively. In an aspect, the first gRNA molecule and the second gRNA molecule include targeting domains comprising, e.g., consisting of, SEQ ID NO: 5594 and SEQ ID NO: 5743, respectively. In an aspect, the first gRNA molecule and the second gRNA molecule include targeting domains comprising, e.g., consisting of, SEQ ID NO: 5594 and SEQ ID NO: 5798, respectively. In an aspect, the first gRNA molecule and the second gRNA molecule include targeting domains comprising, e.g., consisting of, SEQ ID NO: 5594 and SEQ ID NO: 5748, respectively. In an aspect, the first gRNA molecule and the second gRNA molecule include targeting domains comprising, e.g., consisting of, SEQ ID NO: 5594 and SEQ ID NO: 5722, respectively. In an aspect, the first gRNA molecule and the second gRNA molecule include targeting domains comprising, e.g., consisting of, SEQ ID NO: 5594 and SEQ ID NO: 5800, respectively. In an aspect, the first gRNA molecule and the second gRNA molecule include targeting domains comprising, e.g., consisting of, SEQ ID NO: 5594 and SEQ ID NO: 5735, respectively. In an aspect, the first gRNA molecule and the second gRNA molecule include targeting domains comprising, e.g., consisting of, SEQ ID NO: 5594 and SEQ ID NO: 5724, respectively. In an aspect, the first gRNA molecule and the second gRNA molecule include targeting domains comprising, e.g., consisting of, SEQ ID NO: 5594 and SEQ ID NO: 5731, respectively. In an aspect, the first gRNA molecule and the second gRNA molecule include targeting domains comprising, e.g., consisting of, SEQ ID NO: 5594 and SEQ ID NO: 5725, respectively. In an aspect, the first gRNA molecule and the second gRNA molecule include targeting domains comprising, e.g., consisting of, SEQ ID NO: 5594 and SEQ ID NO: 5775, respectively. In an aspect, the first gRNA molecule and the second gRNA molecule include targeting domains comprising, e.g., consisting of, SEQ ID NO: 5594 and SEQ ID NO: 5766, respectively. In an aspect, the first gRNA molecule and the second gRNA molecule include targeting domains comprising, e.g., consisting of, SEQ ID NO: 5594 and SEQ ID NO: 5727, respectively. In an aspect, the first gRNA molecule and the second gRNA molecule include targeting domains comprising, e.g., consisting of, SEQ ID NO: 5594 and SEQ ID NO: 5744, respectively. In an aspect, the first gRNA molecule and the second gRNA molecule include targeting domains comprising, e.g., consisting of, SEQ ID NO: 5594 and SEQ ID NO: 5751, respectively. In an aspect, the first gRNA molecule and the second gRNA molecule include targeting domains comprising, e.g., consisting of, SEQ ID NO: 5594 and SEQ ID NO: 5734, respectively. In an aspect, the first gRNA molecule and the second gRNA molecule include targeting domains comprising, e.g., consisting of, SEQ ID NO: 5571 and SEQ ID NO: 5743, respectively. In an aspect, the first gRNA molecule and the second gRNA molecule include targeting domains comprising, e.g., consisting of, SEQ ID NO: 5571 and SEQ ID NO: 5798, respectively. In an aspect, the first gRNA molecule and the second gRNA molecule include targeting domains comprising, e.g., consisting of, SEQ ID NO: 5571 and SEQ ID NO: 5748, respectively. In an aspect, the first gRNA molecule and the second gRNA molecule include targeting domains comprising, e.g., consisting of, SEQ ID NO: 5571 and SEQ ID NO: 5722, respectively. In an aspect, the first gRNA molecule and the second gRNA molecule include targeting domains comprising, e.g., consisting of, SEQ ID NO: 5571 and SEQ ID NO: 5800, respectively. In an aspect, the first gRNA molecule and the second gRNA molecule include targeting domains comprising, e.g., consisting of, SEQ ID NO: 5571 and SEQ ID NO: 5735, respectively. In an aspect, the first gRNA molecule and the second gRNA molecule include targeting domains comprising, e.g., consisting of, SEQ ID NO: 5571 and SEQ ID NO: 5724, respectively. In an aspect, the first gRNA molecule and the second gRNA molecule include targeting domains comprising, e.g., consisting of, SEQ ID NO: 5571 and SEQ ID NO: 5731, respectively. In an aspect, the first gRNA molecule and the second gRNA molecule include targeting domains comprising, e.g., consisting of, SEQ ID NO: 5571 and SEQ ID NO: 5725, respectively. In an aspect, the first gRNA molecule and the second gRNA molecule include targeting domains comprising, e.g., consisting of, SEQ ID NO: 5571 and SEQ ID NO: 5775, respectively. In an aspect, the first gRNA molecule and the second gRNA molecule include targeting domains comprising, e.g., consisting of, SEQ ID NO: 5571 and SEQ ID NO: 5766, respectively. In an aspect, the first gRNA molecule and the second gRNA molecule include targeting domains comprising, e.g., consisting of, SEQ ID NO: 5571 and SEQ ID NO: 5727, respectively. In an aspect, the first gRNA molecule and the second gRNA molecule include targeting domains comprising, e.g., consisting of, SEQ ID NO: 5571 and SEQ ID NO: 5744, respectively. In an aspect, the first gRNA molecule and the second gRNA molecule include targeting domains comprising, e.g., consisting of, SEQ ID NO: 5571 and SEQ ID NO: 5751, respectively. In an aspect, the first gRNA molecule and the second gRNA molecule include targeting domains comprising, e.g., consisting of, SEQ ID NO: 5571 and SEQ ID NO: 5734, respectively. In an aspect, the first gRNA molecule and the second gRNA molecule include targeting domains comprising, e.g., consisting of, SEQ ID NO: 5593 and SEQ ID NO: 5743, respectively. In an aspect, the first gRNA molecule and the second gRNA molecule include targeting domains comprising, e.g., consisting of, SEQ ID NO: 5593 and SEQ ID NO: 5798, respectively. In an aspect, the first gRNA molecule and the second gRNA molecule include targeting domains comprising, e.g., consisting of, SEQ ID NO: 5593 and SEQ ID NO: 5748, respectively. In an aspect, the first gRNA molecule and the second gRNA molecule include targeting domains comprising, e.g., consisting of, SEQ ID NO: 5593 and SEQ ID NO: 5722, respectively. In an aspect, the first gRNA molecule and the second gRNA molecule include targeting domains comprising, e.g., consisting of, SEQ ID NO: 5593 and SEQ ID NO: 5800, respectively. In an aspect, the first gRNA molecule and the second gRNA molecule include targeting domains comprising, e.g., consisting of, SEQ ID NO: 5593 and SEQ ID NO: 5735, respectively. In an aspect, the first gRNA molecule and the second gRNA molecule include targeting domains comprising, e.g., consisting of, SEQ ID NO: 5593 and SEQ ID NO: 5724, respectively. In an aspect, the first gRNA molecule and the second gRNA molecule include targeting domains comprising, e.g., consisting of, SEQ ID NO: 5593 and SEQ ID NO: 5731, respectively. In an aspect, the first gRNA molecule and the second gRNA molecule include targeting domains comprising, e.g., consisting of, SEQ ID NO: 5593 and SEQ ID NO: 5725, respectively. In an aspect, the first gRNA molecule and the second gRNA molecule include targeting domains comprising, e.g., consisting of, SEQ ID NO: 5593 and SEQ ID NO: 5775, respectively. In an aspect, the first gRNA molecule and the second gRNA molecule include targeting domains comprising, e.g., consisting of, SEQ ID NO: 5593 and SEQ ID NO: 5766, respectively. In an aspect, the first gRNA molecule and the second gRNA molecule include targeting domains comprising, e.g., consisting of, SEQ ID NO: 5593 and SEQ ID NO: 5727, respectively. In an aspect, the first gRNA molecule and the second gRNA molecule include targeting domains comprising, e.g., consisting of, SEQ ID NO: 5593 and SEQ ID NO: 5744, respectively. In an aspect, the first gRNA molecule and the second gRNA molecule include targeting domains comprising, e.g., consisting of, SEQ ID NO: 5593 and SEQ ID NO: 5751, respectively. In an aspect, the first gRNA molecule and the second gRNA molecule include targeting domains comprising, e.g., consisting of, SEQ ID NO: 5593 and SEQ ID NO: 5734, respectively. In an aspect, the first gRNA molecule and the second gRNA molecule include targeting domains comprising, e.g., consisting of, SEQ ID NO: 5574 and SEQ ID NO: 5743, respectively. In an aspect, the first gRNA molecule and the second gRNA molecule include targeting domains comprising, e.g., consisting of, SEQ ID NO: 5574 and SEQ ID NO: 5798, respectively. In an aspect, the first gRNA molecule and the second gRNA molecule include targeting domains comprising, e.g., consisting of, SEQ ID NO: 5574 and SEQ ID NO: 5748, respectively. In an aspect, the first gRNA molecule and the second gRNA molecule include targeting domains comprising, e.g., consisting of, SEQ ID NO: 5574 and SEQ ID NO: 5722, respectively. In an aspect, the first gRNA molecule and the second gRNA molecule include targeting domains comprising, e.g., consisting of, SEQ ID NO: 5574 and SEQ ID NO: 5800, respectively. In an aspect, the first gRNA molecule and the second gRNA molecule include targeting domains comprising, e.g., consisting of, SEQ ID NO: 5574 and SEQ ID NO: 5735, respectively. In an aspect, the first gRNA molecule and the second gRNA molecule include targeting domains comprising, e.g., consisting of, SEQ ID NO: 5574 and SEQ ID NO: 5724, respectively. In an aspect, the first gRNA molecule and the second gRNA molecule include targeting domains comprising, e.g., consisting of, SEQ ID NO: 5574 and SEQ ID NO: 5731, respectively. In an aspect, the first gRNA molecule and the second gRNA molecule include targeting domains comprising, e.g., consisting of, SEQ ID NO: 5574 and SEQ ID NO: 5725, respectively. In an aspect, the first gRNA molecule and the second gRNA molecule include targeting domains comprising, e.g., consisting of, SEQ ID NO: 5574 and SEQ ID NO: 5775, respectively. In an aspect, the first gRNA molecule and the second gRNA molecule include targeting domains comprising, e.g., consisting of, SEQ ID NO: 5574 and SEQ ID NO: 5766, respectively. In an aspect, the first gRNA molecule and the second gRNA molecule include targeting domains comprising, e.g., consisting of, SEQ ID NO: 5574 and SEQ ID NO: 5727, respectively. In an aspect, the first gRNA molecule and the second gRNA molecule include targeting domains comprising, e.g., consisting of, SEQ ID NO: 5574 and SEQ ID NO: 5744, respectively. In an aspect, the first gRNA molecule and the second gRNA molecule include targeting domains comprising, e.g., consisting of, SEQ ID NO: 5574 and SEQ ID NO: 5751, respectively. In an aspect, the first gRNA molecule and the second gRNA molecule include targeting domains comprising, e.g., consisting of, SEQ ID NO: 5574 and SEQ ID NO: 5734, respectively. In an aspect, the first gRNA molecule and the second gRNA molecule include targeting domains comprising, e.g., consisting of, SEQ ID NO: 5598 and SEQ ID NO: 5743, respectively. In an aspect, the first gRNA molecule and the second gRNA molecule include targeting domains comprising, e.g., consisting of, SEQ ID NO: 5598 and SEQ ID NO: 5798, respectively. In an aspect, the first gRNA molecule and the second gRNA molecule include targeting domains comprising, e.g., consisting of, SEQ ID NO: 5598 and SEQ ID NO: 5748, respectively. In an aspect, the first gRNA molecule and the second gRNA molecule include targeting domains comprising, e.g., consisting of, SEQ ID NO: 5598 and SEQ ID NO: 5722, respectively. In an aspect, the first gRNA molecule and the second gRNA molecule include targeting domains comprising, e.g., consisting of, SEQ ID NO: 5598 and SEQ ID NO: 5800, respectively. In an aspect, the first gRNA molecule and the second gRNA molecule include targeting domains comprising, e.g., consisting of, SEQ ID NO: 5598 and SEQ ID NO: 5735, respectively. In an aspect, the first gRNA molecule and the second gRNA molecule include targeting domains comprising, e.g., consisting of, SEQ ID NO: 5598 and SEQ ID NO: 5724, respectively. In an aspect, the first gRNA molecule and the second gRNA molecule include targeting domains comprising, e.g., consisting of, SEQ ID NO: 5598 and SEQ ID NO: 5731, respectively. In an aspect, the first gRNA molecule and the second gRNA molecule include targeting domains comprising, e.g., consisting of, SEQ ID NO: 5598 and SEQ ID NO: 5725, respectively. In an aspect, the first gRNA molecule and the second gRNA molecule include targeting domains comprising, e.g., consisting of, SEQ ID NO: 5598 and SEQ ID NO: 5775, respectively. In an aspect, the first gRNA molecule and the second gRNA molecule include targeting domains comprising, e.g., consisting of, SEQ ID NO: 5598 and SEQ ID NO: 5766, respectively. In an aspect, the first gRNA molecule and the second gRNA molecule include targeting domains comprising, e.g., consisting of, SEQ ID NO: 5598 and SEQ ID NO: 5727, respectively. In an aspect, the first gRNA molecule and the second gRNA molecule include targeting domains comprising, e.g., consisting of, SEQ ID NO: 5598 and SEQ ID NO: 5744, respectively. In an aspect, the first gRNA molecule and the second gRNA molecule include targeting domains comprising, e.g., consisting of, SEQ ID NO: 5598 and SEQ ID NO: 5751, respectively. In an aspect, the first gRNA molecule and the second gRNA molecule include targeting domains comprising, e.g., consisting of, SEQ ID NO: 5598 and SEQ ID NO: 5734, respectively. In an aspect, the first gRNA molecule and the second gRNA molecule include targeting domains comprising, e.g., consisting of, SEQ ID NO: 5586 and SEQ ID NO: 5743, respectively. In an aspect, the first gRNA molecule and the second gRNA molecule include targeting domains comprising, e.g., consisting of, SEQ ID NO: 5586 and SEQ ID NO: 5798, respectively. In an aspect, the first gRNA molecule and the second gRNA molecule include targeting domains comprising, e.g., consisting of, SEQ ID NO: 5586 and SEQ ID NO: 5748, respectively. In an aspect, the first gRNA molecule and the second gRNA molecule include targeting domains comprising, e.g., consisting of, SEQ ID NO: 5586 and SEQ ID NO: 5722, respectively. In an aspect, the first gRNA molecule and the second gRNA molecule include targeting domains comprising, e.g., consisting of, SEQ ID NO: 5586 and SEQ ID NO: 5800, respectively. In an aspect, the first gRNA molecule and the second gRNA molecule include targeting domains comprising, e.g., consisting of, SEQ ID NO: 5586 and SEQ ID NO: 5735, respectively. In an aspect, the first gRNA molecule and the second gRNA molecule include targeting domains comprising, e.g., consisting of, SEQ ID NO: 5586 and SEQ ID NO: 5724, respectively. In an aspect, the first gRNA molecule and the second gRNA molecule include targeting domains comprising, e.g., consisting of, SEQ ID NO: 5586 and SEQ ID NO: 5731, respectively. In an aspect, the first gRNA molecule and the second gRNA molecule include targeting domains comprising, e.g., consisting of, SEQ ID NO: 5586 and SEQ ID NO: 5725, respectively. In an aspect, the first gRNA molecule and the second gRNA molecule include targeting domains comprising, e.g., consisting of, SEQ ID NO: 5586 and SEQ ID NO: 5775, respectively. In an aspect, the first gRNA molecule and the second gRNA molecule include targeting domains comprising, e.g., consisting of, SEQ ID NO: 5586 and SEQ ID NO: 5766, respectively. In an aspect, the first gRNA molecule and the second gRNA molecule include targeting domains comprising, e.g., consisting of, SEQ ID NO: 5586 and SEQ ID NO: 5727, respectively. In an aspect, the first gRNA molecule and the second gRNA molecule include targeting domains comprising, e.g., consisting of, SEQ ID NO: 5586 and SEQ ID NO: 5744, respectively. In an aspect, the first gRNA molecule and the second gRNA molecule include targeting domains comprising, e.g., consisting of, SEQ ID NO: 5586 and SEQ ID NO: 5751, respectively. In an aspect, the first gRNA molecule and the second gRNA molecule include targeting domains comprising, e.g., consisting of, SEQ ID NO: 5586 and SEQ ID NO: 5734, respectively. In an aspect, the first gRNA molecule and the second gRNA molecule include targeting domains comprising, e.g., consisting of, SEQ ID NO: 5599 and SEQ ID NO: 5743, respectively. In an aspect, the first gRNA molecule and the second gRNA molecule include targeting domains comprising, e.g., consisting of, SEQ ID NO: 5599 and SEQ ID NO: 5798, respectively. In an aspect, the first gRNA molecule and the second gRNA molecule include targeting domains comprising, e.g., consisting of, SEQ ID NO: 5599 and SEQ ID NO: 5748, respectively. In an aspect, the first gRNA molecule and the second gRNA molecule include targeting domains comprising, e.g., consisting of, SEQ ID NO: 5599 and SEQ ID NO: 5722, respectively. In an aspect, the first gRNA molecule and the second gRNA molecule include targeting domains comprising, e.g., consisting of, SEQ ID NO: 5599 and SEQ ID NO: 5800, respectively. In an aspect, the first gRNA molecule and the second gRNA molecule include targeting domains comprising, e.g., consisting of, SEQ ID NO: 5599 and SEQ ID NO: 5735, respectively. In an aspect, the first gRNA molecule and the second gRNA molecule include targeting domains comprising, e.g., consisting of, SEQ ID NO: 5599 and SEQ ID NO: 5724, respectively. In an aspect, the first gRNA molecule and the second gRNA molecule include targeting domains comprising, e.g., consisting of, SEQ ID NO: 5599 and SEQ ID NO: 5731, respectively. In an aspect, the first gRNA molecule and the second gRNA molecule include targeting domains comprising, e.g., consisting of, SEQ ID NO: 5599 and SEQ ID NO: 5725, respectively. In an aspect, the first gRNA molecule and the second gRNA molecule include targeting domains comprising, e.g., consisting of, SEQ ID NO: 5599 and SEQ ID NO: 5775, respectively. In an aspect, the first gRNA molecule and the second gRNA molecule include targeting domains comprising, e.g., consisting of, SEQ ID NO: 5599 and SEQ ID NO: 5766, respectively. In an aspect, the first gRNA molecule and the second gRNA molecule include targeting domains comprising, e.g., consisting of, SEQ ID NO: 5599 and SEQ ID NO: 5727, respectively. In an aspect, the first gRNA molecule and the second gRNA molecule include targeting domains comprising, e.g., consisting of, SEQ ID NO: 5599 and SEQ ID NO: 5744, respectively. In an aspect, the first gRNA molecule and the second gRNA molecule include targeting domains comprising, e.g., consisting of, SEQ ID NO: 5599 and SEQ ID NO: 5751, respectively. In an aspect, the first gRNA molecule and the second gRNA molecule include targeting domains comprising, e.g., consisting of, SEQ ID NO: 5599 and SEQ ID NO: 5734, respectively. In an aspect, the first gRNA molecule and the second gRNA molecule include targeting domains comprising, e.g., consisting of, SEQ ID NO: 5591 and SEQ ID NO: 5743, respectively. In an aspect, the first gRNA molecule and the second gRNA molecule include targeting domains comprising, e.g., consisting of, SEQ ID NO: 5591 and SEQ ID NO: 5798, respectively. In an aspect, the first gRNA molecule and the second gRNA molecule include targeting domains comprising, e.g., consisting of, SEQ ID NO: 5591 and SEQ ID NO: 5748, respectively. In an aspect, the first gRNA molecule and the second gRNA molecule include targeting domains comprising, e.g., consisting of, SEQ ID NO: 5591 and SEQ ID NO: 5722, respectively. In an aspect, the first gRNA molecule and the second gRNA molecule include targeting domains comprising, e.g., consisting of, SEQ ID NO: 5591 and SEQ ID NO: 5800, respectively. In an aspect, the first gRNA molecule and the second gRNA molecule include targeting domains comprising, e.g., consisting of, SEQ ID NO: 5591 and SEQ ID NO: 5735, respectively. In an aspect, the first gRNA molecule and the second gRNA molecule include targeting domains comprising, e.g., consisting of, SEQ ID NO: 5591 and SEQ ID NO: 5724, respectively. In an aspect, the first gRNA molecule and the second gRNA molecule include targeting domains comprising, e.g., consisting of, SEQ ID NO: 5591 and SEQ ID NO: 5731, respectively. In an aspect, the first gRNA molecule and the second gRNA molecule include targeting domains comprising, e.g., consisting of, SEQ ID NO: 5591 and SEQ ID NO: 5725, respectively. In an aspect, the first gRNA molecule and the second gRNA molecule include targeting domains comprising, e.g., consisting of, SEQ ID NO: 5591 and SEQ ID NO: 5775, respectively. In an aspect, the first gRNA molecule and the second gRNA molecule include targeting domains comprising, e.g., consisting of, SEQ ID NO: 5591 and SEQ ID NO: 5766, respectively. In an aspect, the first gRNA molecule and the second gRNA molecule include targeting domains comprising, e.g., consisting of, SEQ ID NO: 5591 and SEQ ID NO: 5727, respectively. In an aspect, the first gRNA molecule and the second gRNA molecule include targeting domains comprising, e.g., consisting of, SEQ ID NO: 5591 and SEQ ID NO: 5744, respectively. In an aspect, the first gRNA molecule and the second gRNA molecule include targeting domains comprising, e.g., consisting of, SEQ ID NO: 5591 and SEQ ID NO: 5751, respectively. In an aspect, the first gRNA molecule and the second gRNA molecule include targeting domains comprising, e.g., consisting of, SEQ ID NO: 5591 and SEQ ID NO: 5734, respectively. In an aspect, the first gRNA molecule and the second gRNA molecule include targeting domains comprising, e.g., consisting of, SEQ ID NO: 5568 and SEQ ID NO: 5743, respectively. In an aspect, the first gRNA molecule and the second gRNA molecule include targeting domains comprising, e.g., consisting of, SEQ ID NO: 5568 and SEQ ID NO: 5798, respectively. In an aspect, the first gRNA molecule and the second gRNA molecule include targeting domains comprising, e.g., consisting of, SEQ ID NO: 5568 and SEQ ID NO: 5748, respectively. In an aspect, the first gRNA molecule and the second gRNA molecule include targeting domains comprising, e.g., consisting of, SEQ ID NO: 5568 and SEQ ID NO: 5722, respectively. In an aspect, the first gRNA molecule and the second gRNA molecule include targeting domains comprising, e.g., consisting of, SEQ ID NO: 5568 and SEQ ID NO: 5800, respectively. In an aspect, the first gRNA molecule and the second gRNA molecule include targeting domains comprising, e.g., consisting of, SEQ ID NO: 5568 and SEQ ID NO: 5735, respectively. In an aspect, the first gRNA molecule and the second gRNA molecule include targeting domains comprising, e.g., consisting of, SEQ ID NO: 5568 and SEQ ID NO: 5724, respectively. In an aspect, the first gRNA molecule and the second gRNA molecule include targeting domains comprising, e.g., consisting of, SEQ ID NO: 5568 and SEQ ID NO: 5731, respectively. In an aspect, the first gRNA molecule and the second gRNA molecule include targeting domains comprising, e.g., consisting of, SEQ ID NO: 5568 and SEQ ID NO: 5725, respectively. In an aspect, the first gRNA molecule and the second gRNA molecule include targeting domains comprising, e.g., consisting of, SEQ ID NO: 5568 and SEQ ID NO: 5775, respectively. In an aspect, the first gRNA molecule and the second gRNA molecule include targeting domains comprising, e.g., consisting of, SEQ ID NO: 5568 and SEQ ID NO: 5766, respectively. In an aspect, the first gRNA molecule and the second gRNA molecule include targeting domains comprising, e.g., consisting of, SEQ ID NO: 5568 and SEQ ID NO: 5727, respectively. In an aspect, the first gRNA molecule and the second gRNA molecule include targeting domains comprising, e.g., consisting of, SEQ ID NO: 5568 and SEQ ID NO: 5744, respectively. In an aspect, the first gRNA molecule and the second gRNA molecule include targeting domains comprising, e.g., consisting of, SEQ ID NO: 5568 and SEQ ID NO: 5751, respectively. In an aspect, the first gRNA molecule and the second gRNA molecule include targeting domains comprising, e.g., consisting of, SEQ ID NO: 5568 and SEQ ID NO: 5734, respectively. In an aspect, the first gRNA molecule and the second gRNA molecule include targeting domains comprising, e.g., consisting of, SEQ ID NO: 5610 and SEQ ID NO: 5743, respectively. In an aspect, the first gRNA molecule and the second gRNA molecule include targeting domains comprising, e.g., consisting of, SEQ ID NO: 5610 and SEQ ID NO: 5798, respectively. In an aspect, the first gRNA molecule and the second gRNA molecule include targeting domains comprising, e.g., consisting of, SEQ ID NO: 5610 and SEQ ID NO: 5748, respectively. In an aspect, the first gRNA molecule and the second gRNA molecule include targeting domains comprising, e.g., consisting of, SEQ ID NO: 5610 and SEQ ID NO: 5722, respectively. In an aspect, the first gRNA molecule and the second gRNA molecule include targeting domains comprising, e.g., consisting of, SEQ ID NO: 5610 and SEQ ID NO: 5800, respectively. In an aspect, the first gRNA molecule and the second gRNA molecule include targeting domains comprising, e.g., consisting of, SEQ ID NO: 5610 and SEQ ID NO: 5735, respectively. In an aspect, the first gRNA molecule and the second gRNA molecule include targeting domains comprising, e.g., consisting of, SEQ ID NO: 5610 and SEQ ID NO: 5724, respectively. In an aspect, the first gRNA molecule and the second gRNA molecule include targeting domains comprising, e.g., consisting of, SEQ ID NO: 5610 and SEQ ID NO: 5731, respectively. In an aspect, the first gRNA molecule and the second gRNA molecule include targeting domains comprising, e.g., consisting of, SEQ ID NO: 5610 and SEQ ID NO: 5725, respectively. In an aspect, the first gRNA molecule and the second gRNA molecule include targeting domains comprising, e.g., consisting of, SEQ ID NO: 5610 and SEQ ID NO: 5775, respectively. In an aspect, the first gRNA molecule and the second gRNA molecule include targeting domains comprising, e.g., consisting of, SEQ ID NO: 5610 and SEQ ID NO: 5766, respectively. In an aspect, the first gRNA molecule and the second gRNA molecule include targeting domains comprising, e.g., consisting of, SEQ ID NO: 5610 and SEQ ID NO: 5727, respectively. In an aspect, the first gRNA molecule and the second gRNA molecule include targeting domains comprising, e.g., consisting of, SEQ ID NO: 5610 and SEQ ID NO: 5744, respectively. In an aspect, the first gRNA molecule and the second gRNA molecule include targeting domains comprising, e.g., consisting of, SEQ ID NO: 5610 and SEQ ID NO: 5751, respectively. In an aspect, the first gRNA molecule and the second gRNA molecule include targeting domains comprising, e.g., consisting of, SEQ ID NO: 5610 and SEQ ID NO: 5734, respectively. In an aspect, the first gRNA molecule and the second gRNA molecule include targeting domains comprising, e.g., consisting of, SEQ ID NO: 5608 and SEQ ID NO: 5743, respectively. In an aspect, the first gRNA molecule and the second gRNA molecule include targeting domains comprising, e.g., consisting of, SEQ ID NO: 5608 and SEQ ID NO: 5798, respectively. In an aspect, the first gRNA molecule and the second gRNA molecule include targeting domains comprising, e.g., consisting of, SEQ ID NO: 5608 and SEQ ID NO: 5748, respectively. In an aspect, the first gRNA molecule and the second gRNA molecule include targeting domains comprising, e.g., consisting of, SEQ ID NO: 5608 and SEQ ID NO: 5722, respectively. In an aspect, the first gRNA molecule and the second gRNA molecule include targeting domains comprising, e.g., consisting of, SEQ ID NO: 5608 and SEQ ID NO: 5800, respectively. In an aspect, the first gRNA molecule and the second gRNA molecule include targeting domains comprising, e.g., consisting of, SEQ ID NO: 5608 and SEQ ID NO: 5735, respectively. In an aspect, the first gRNA molecule and the second gRNA molecule include targeting domains comprising, e.g., consisting of, SEQ ID NO: 5608 and SEQ ID NO: 5724, respectively. In an aspect, the first gRNA molecule and the second gRNA molecule include targeting domains comprising, e.g., consisting of, SEQ ID NO: 5608 and SEQ ID NO: 5731, respectively. In an aspect, the first gRNA molecule and the second gRNA molecule include targeting domains comprising, e.g., consisting of, SEQ ID NO: 5608 and SEQ ID NO: 5725, respectively. In an aspect, the first gRNA molecule and the second gRNA molecule include targeting domains comprising, e.g., consisting of, SEQ ID NO: 5608 and SEQ ID NO: 5775, respectively. In an aspect, the first gRNA molecule and the second gRNA molecule include targeting domains comprising, e.g., consisting of, SEQ ID NO: 5608 and SEQ ID NO: 5766, respectively. In an aspect, the first gRNA molecule and the second gRNA molecule include targeting domains comprising, e.g., consisting of, SEQ ID NO: 5608 and SEQ ID NO: 5727, respectively. In an aspect, the first gRNA molecule and the second gRNA molecule include targeting domains comprising, e.g., consisting of, SEQ ID NO: 5608 and SEQ ID NO: 5744, respectively. In an aspect, the first gRNA molecule and the second gRNA molecule include targeting domains comprising, e.g., consisting of, SEQ ID NO: 5608 and SEQ ID NO: 5751, respectively. In an aspect, the first gRNA molecule and the second gRNA molecule include targeting domains comprising, e.g., consisting of, SEQ ID NO: 5608 and SEQ ID NO: 5734, respectively. In an aspect, the first gRNA molecule and the second gRNA molecule include targeting domains comprising, e.g., consisting of, SEQ ID NO: 5617 and SEQ ID NO: 5743, respectively. In an aspect, the first gRNA molecule and the second gRNA molecule include targeting domains comprising, e.g., consisting of, SEQ ID NO: 5617 and SEQ ID NO: 5798, respectively. In an aspect, the first gRNA molecule and the second gRNA molecule include targeting domains comprising, e.g., consisting of, SEQ ID NO: 5617 and SEQ ID NO: 5748, respectively. In an aspect, the first gRNA molecule and the second gRNA molecule include targeting domains comprising, e.g., consisting of, SEQ ID NO: 5617 and SEQ ID NO: 5722, respectively. In an aspect, the first gRNA molecule and the second gRNA molecule include targeting domains comprising, e.g., consisting of, SEQ ID NO: 5617 and SEQ ID NO: 5800, respectively. In an aspect, the first gRNA molecule and the second gRNA molecule include targeting domains comprising, e.g., consisting of, SEQ ID NO: 5617 and SEQ ID NO: 5735, respectively. In an aspect, the first gRNA molecule and the second gRNA molecule include targeting domains comprising, e.g., consisting of, SEQ ID NO: 5617 and SEQ ID NO: 5724, respectively. In an aspect, the first gRNA molecule and the second gRNA molecule include targeting domains comprising, e.g., consisting of, SEQ ID NO: 5617 and SEQ ID NO: 5731, respectively. In an aspect, the first gRNA molecule and the second gRNA molecule include targeting domains comprising, e.g., consisting of, SEQ ID NO: 5617 and SEQ ID NO: 5725, respectively. In an aspect, the first gRNA molecule and the second gRNA molecule include targeting domains comprising, e.g., consisting of, SEQ ID NO: 5617 and SEQ ID NO: 5775, respectively. In an aspect, the first gRNA molecule and the second gRNA molecule include targeting domains comprising, e.g., consisting of, SEQ ID NO: 5617 and SEQ ID NO: 5766, respectively. In an aspect, the first gRNA molecule and the second gRNA molecule include targeting domains comprising, e.g., consisting of, SEQ ID NO: 5617 and SEQ ID NO: 5727, respectively. In an aspect, the first gRNA molecule and the second gRNA molecule include targeting domains comprising, e.g., consisting of, SEQ ID NO: 5617 and SEQ ID NO: 5744, respectively. In an aspect, the first gRNA molecule and the second gRNA molecule include targeting domains comprising, e.g., consisting of, SEQ ID NO: 5617 and SEQ ID NO: 5751, respectively. In an aspect, the first gRNA molecule and the second gRNA molecule include targeting domains comprising, e.g., consisting of, SEQ ID NO: 5617 and SEQ ID NO: 5734, respectively. In an aspect, the first gRNA molecule and the second gRNA molecule include targeting domains comprising, e.g., consisting of, SEQ ID NO: 5619 and SEQ ID NO: 5743, respectively. In an aspect, the first gRNA molecule and the second gRNA molecule include targeting domains comprising, e.g., consisting of, SEQ ID NO: 5619 and SEQ ID NO: 5798, respectively. In an aspect, the first gRNA molecule and the second gRNA molecule include targeting domains comprising, e.g., consisting of, SEQ ID NO: 5619 and SEQ ID NO: 5748, respectively. In an aspect, the first gRNA molecule and the second gRNA molecule include targeting domains comprising, e.g., consisting of, SEQ ID NO: 5619 and SEQ ID NO: 5722, respectively. In an aspect, the first gRNA molecule and the second gRNA molecule include targeting domains comprising, e.g., consisting of, SEQ ID NO: 5619 and SEQ ID NO: 5800, respectively. In an aspect, the first gRNA molecule and the second gRNA molecule include targeting domains comprising, e.g., consisting of, SEQ ID NO: 5619 and SEQ ID NO: 5735, respectively. In an aspect, the first gRNA molecule and the second gRNA molecule include targeting domains comprising, e.g., consisting of, SEQ ID NO: 5619 and SEQ ID NO: 5724, respectively. In an aspect, the first gRNA molecule and the second gRNA molecule include targeting domains comprising, e.g., consisting of, SEQ ID NO: 5619 and SEQ ID NO: 5731, respectively. In an aspect, the first gRNA molecule and the second gRNA molecule include targeting domains comprising, e.g., consisting of, SEQ ID NO: 5619 and SEQ ID NO: 5725, respectively. In an aspect, the first gRNA molecule and the second gRNA molecule include targeting domains comprising, e.g., consisting of, SEQ ID NO: 5619 and SEQ ID NO: 5775, respectively. In an aspect, the first gRNA molecule and the second gRNA molecule include targeting domains comprising, e.g., consisting of, SEQ ID NO: 5619 and SEQ ID NO: 5766, respectively. In an aspect, the first gRNA molecule and the second gRNA molecule include targeting domains comprising, e.g., consisting of, SEQ ID NO: 5619 and SEQ ID NO: 5727, respectively. In an aspect, the first gRNA molecule and the second gRNA molecule include targeting domains comprising, e.g., consisting of, SEQ ID NO: 5619 and SEQ ID NO: 5744, respectively. In an aspect, the first gRNA molecule and the second gRNA molecule include targeting domains comprising, e.g., consisting of, SEQ ID NO: 5619 and SEQ ID NO: 5751, respectively. In an aspect, the first gRNA molecule and the second gRNA molecule include targeting domains comprising, e.g., consisting of, SEQ ID NO: 5619 and SEQ ID NO: 5734, respectively. In an aspect, the first gRNA molecule and the second gRNA molecule include targeting domains comprising, e.g., consisting of, SEQ ID NO: 5620 and SEQ ID NO: 5743, respectively. In an aspect, the first gRNA molecule and the second gRNA molecule include targeting domains comprising, e.g., consisting of, SEQ ID NO: 5620 and SEQ ID NO: 5798, respectively. In an aspect, the first gRNA molecule and the second gRNA molecule include targeting domains comprising, e.g., consisting of, SEQ ID NO: 5620 and SEQ ID NO: 5748, respectively. In an aspect, the first gRNA molecule and the second gRNA molecule include targeting domains comprising, e.g., consisting of, SEQ ID NO: 5620 and SEQ ID NO: 5722, respectively. In an aspect, the first gRNA molecule and the second gRNA molecule include targeting domains comprising, e.g., consisting of, SEQ ID NO: 5620 and SEQ ID NO: 5800, respectively. In an aspect, the first gRNA molecule and the second gRNA molecule include targeting domains comprising, e.g., consisting of, SEQ ID NO: 5620 and SEQ ID NO: 5735, respectively. In an aspect, the first gRNA molecule and the second gRNA molecule include targeting domains comprising, e.g., consisting of, SEQ ID NO: 5620 and SEQ ID NO: 5724, respectively. In an aspect, the first gRNA molecule and the second gRNA molecule include targeting domains comprising, e.g., consisting of, SEQ ID NO: 5620 and SEQ ID NO: 5731, respectively. In an aspect, the first gRNA molecule and the second gRNA molecule include targeting domains comprising, e.g., consisting of, SEQ ID NO: 5620 and SEQ ID NO: 5725, respectively. In an aspect, the first gRNA molecule and the second gRNA molecule include targeting domains comprising, e.g., consisting of, SEQ ID NO: 5620 and SEQ ID NO: 5775, respectively. In an aspect, the first gRNA molecule and the second gRNA molecule include targeting domains comprising, e.g., consisting of, SEQ ID NO: 5620 and SEQ ID NO: 5766, respectively. In an aspect, the first gRNA molecule and the second gRNA molecule include targeting domains comprising, e.g., consisting of, SEQ ID NO: 5620 and SEQ ID NO: 5727, respectively. In an aspect, the first gRNA molecule and the second gRNA molecule include targeting domains comprising, e.g., consisting of, SEQ ID NO: 5620 and SEQ ID NO: 5744, respectively. In an aspect, the first gRNA molecule and the second gRNA molecule include targeting domains comprising, e.g., consisting of, SEQ ID NO: 5620 and SEQ ID NO: 5751, respectively. In an aspect, the first gRNA molecule and the second gRNA molecule include targeting domains comprising, e.g., consisting of, SEQ ID NO: 5620 and SEQ ID NO: 5734, respectively.

[1155] As described herein, it is contemplated to generate a cell (or population of cells), e.g., an immune effector cell, e.g., a CAR-expressing immune effector cell, e.g., as described herein, which has reduced or eliminated expression of TRAC, B2M and CIITA. While it is contemplated that gRNAs comprising any targeting domain disclosed herein to each of these targets may be used in combination, particularly preferred targeting domain sequences to be used, for example, in combination are provided in the Table 33 below. In embodiments, each of the gRNA molecules are provided in dual guide RNA format and include a crRNA comprising, e.g., consisting of, the sequence [targeting domain]-SEQ ID NO: 6607, and a tracr comprising, e.g., consisting of, the sequence of SEQ ID NO: 6660. In other embodiments, each of the gRNA molecules are provided in single guide RNA format comprising, e.g., consisting of, the sequence: [targeting domain]-SEQ ID NO: 6601. In other embodiments, each of the gRNA molecules are provided in single guide RNA format comprising, e.g., consisting of, the sequence: [targeting domain]-SEQ ID NO: 7811. In embodiments, one or more of the gRNA molecules, e.g., all of the gRNA molecules, additionally comprise one or more modifications described herein, e.g., comprise one or more, e.g., 3,3′ and/or 5′ phosphorothioate bonds, and/or one or more, e.g., 3,3′ and/or 5′ 2′-OMe modifications. In embodiments, each of the gRNA molecules is complexed with a Cas9 molecule (e.g., described herein) and delivered to the cell (or population of cells, e.g., as described herein) as RNP, e.g., by electroporation. In embodiments, the RNP comprising each gRNA molecule are mixed with the cells and introduced simultaneously, e.g., by a single electroporation step. In other embodiments, the RNP may be introduced sequentially. Where it is contemplated to reduce or eliminate expression of both B2M and CIITA in a cell (such as here), in embodiments the cells may be further engineered to express a NK inhibitory molecule, e.g., as described herein, e.g., an HLA-G:B2M fusion described herein.

TABLE 33
Examples of preferred targeting domains of first, second
and third gRNA molecules that can be used in combination
to reduce or eliminate expression of TRAC, B2M and
CIITA in a cell (as described herein).

| | SEQ ID NO: s of targeting domains |
|---|---|
| Combination | of first gRNA, second gRNA |
| Number | and third gRNA, respectively |
| A1 | SEQ ID NO: 5569 and SEQ ID |
| | NO: 7769 and SEQ ID NO: 5496 |
| A2 | SEQ ID NO: 5569 and SEQ ID |
| | NO: 7771 and SEQ ID NO: 5496 |
| A3 | SEQ ID NO: 5569 and SEQ ID |
| | NO: 7739 and SEQ ID NO: 5496 |
| A4 | SEQ ID NO: 5569 and SEQ ID |
| | NO: 7785 and SEQ ID NO: 5496 |
| A5 | SEQ ID NO: 5569 and SEQ ID |
| | NO: 7769 and SEQ ID NO: 5498 |
| A6 | SEQ ID NO: 5569 and SEQ ID |
| | NO: 7771 and SEQ ID NO: 5498 |
| A7 | SEQ ID NO: 5569 and SEQ ID |
| | NO: 7739 and SEQ ID NO: 5498 |
| A8 | SEQ ID NO: 5569 and SEQ ID |
| | NO: 7785 and SEQ ID NO: 5498 |
| A9 | SEQ ID NO: 5569 and SEQ ID |
| | NO: 7769 and SEQ ID NO: 5509 |
| A10 | SEQ ID NO: 5569 and SEQ ID |
| | NO: 7771 and SEQ ID NO: 5509 |
| A11 | SEQ ID NO: 5569 and SEQ ID |
| | NO: 7739 and SEQ ID NO: 5509 |
| A12 | SEQ ID NO: 5569 and SEQ ID |
| | NO: 7785 and SEQ ID NO: 5509 |
| A13 | SEQ ID NO: 5586 and SEQ ID |
| | NO: 7769 and SEQ ID NO: 5496 |
| A14 | SEQ ID NO: 5586 and SEQ ID |
| | NO: 7771 and SEQ ID NO: 5496 |
| A15 | SEQ ID NO: 5586 and SEQ ID |
| | NO: 7739 and SEQ ID NO: 5496 |
| A16 | SEQ ID NO: 5586 and SEQ ID |
| | NO: 7785 and SEQ ID NO: 5496 |
| A17 | SEQ ID NO: 5586 and SEQ ID |
| | NO: 7769 and SEQ ID NO: 5498 |
| A18 | SEQ ID NO: 5586 and SEQ ID |
| | NO: 7771 and SEQ ID NO: 5498 |
| A19 | SEQ ID NO: 5586 and SEQ ID |
| | NO: 7739 and SEQ ID NO: 5498 |
| A20 | SEQ ID NO: 5586 and SEQ ID |
| | NO: 7785 and SEQ ID NO: 5498 |
| A21 | SEQ ID NO: 5586 and SEQ ID |
| | NO: 7769 and SEQ ID NO: 5509 |
| A22 | SEQ ID NO: 5586 and SEQ ID |
| | NO: 7771 and SEQ ID NO: 5509 |
| A23 | SEQ ID NO: 5586 and SEQ ID |
| | NO: 7739 and SEQ ID NO: 5509 |
| A24 | SEQ ID NO: 5586 and SEQ ID |
| | NO: 7785 and SEQ ID NO: 5509 |
| A25 | SEQ ID NO: 5587 and SEQ ID |
| | NO: 7769 and SEQ ID NO: 5496 |
| A26 | SEQ ID NO: 5587 and SEQ ID |
| | NO: 7771 and SEQ ID NO: 5496 |
| A27 | SEQ ID NO: 5587 and SEQ ID |
| | NO: 7739 and SEQ ID NO: 5496 |
| A28 | SEQ ID NO: 5587 and SEQ ID |
| | NO: 7785 and SEQ ID NO: 5496 |
| A29 | SEQ ID NO: 5587 and SEQ ID |
| | NO: 7769 and SEQ ID NO: 5498 |
| A30 | SEQ ID NO: 5587 and SEQ ID |
| | NO: 7771 and SEQ ID NO: 5498 |
| A31 | SEQ ID NO: 5587 and SEQ ID |
| | NO: 7739 and SEQ ID NO: 5498 |
| A32 | SEQ ID NO: 5587 and SEQ ID |
| | NO: 7785 and SEQ ID NO: 5498 |
| A33 | SEQ ID NO: 5587 and SEQ ID |
| | NO: 7769 and SEQ ID NO: 5509 |
| A34 | SEQ ID NO: 5587 and SEQ ID |
| | NO: 7771 and SEQ ID NO: 5509 |
| A35 | SEQ ID NO: 5587 and SEQ ID |
| | NO: 7739 and SEQ ID NO: 5509 |
| A36 | SEQ ID NO: 5587 and SEQ ID |
| | NO: 7785 and SEQ ID NO: 5509 |
| A37 | SEQ ID NO: 5592 and SEQ ID |
| | NO: 7769 and SEQ ID NO: 5496 |
| A38 | SEQ ID NO: 5592 and SEQ ID |
| | NO: 7771 and SEQ ID NO: 5496 |
| A39 | SEQ ID NO: 5592 and SEQ ID |
| | NO: 7739 and SEQ ID NO: 5496 |
| A40 | SEQ ID NO: 5592 and SEQ ID |
| | NO: 7785 and SEQ ID NO: 5496 |
| A41 | SEQ ID NO: 5592 and SEQ ID |
| | NO: 7769 and SEQ ID NO: 5498 |
| A42 | SEQ ID NO: 5592 and SEQ ID |
| | NO: 7771 and SEQ ID NO: 5498 |
| A43 | SEQ ID NO: 5592 and SEQ ID |
| | NO: 7739 and SEQ ID NO: 5498 |
| A44 | SEQ ID NO: 5592 and SEQ ID |
| | NO: 7785 and SEQ ID NO: 5498 |
| A45 | SEQ ID NO: 5592 and SEQ ID |
| | NO: 7769 and SEQ ID NO: 5509 |
| A46 | SEQ ID NO: 5592 and SEQ ID |
| | NO: 7771 and SEQ ID NO: 5509 |
| A47 | SEQ ID NO: 5592 and SEQ ID |
| | NO: 7739 and SEQ ID NO: 5509 |
| A48 | SEQ ID NO: 5592 and SEQ ID |
| | NO: 7785 and SEQ ID NO: 5509 |
| A49 | SEQ ID NO: 5599 and SEQ ID |
| | NO: 7769 and SEQ ID NO: 5496 |
| A50 | SEQ ID NO: 5599 and SEQ ID |
| | NO: 7771 and SEQ ID NO: 5496 |
| A51 | SEQ ID NO: 5599 and SEQ ID |
| | NO: 7739 and SEQ ID NO: 5496 |
| A52 | SEQ ID NO: 5599 and SEQ ID |
| | NO: 7785 and SEQ ID NO: 5496 |
| A53 | SEQ ID NO: 5599 and SEQ ID |
| | NO: 7769 and SEQ ID NO: 5498 |
| A54 | SEQ ID NO: 5599 and SEQ ID |
| | NO: 7771 and SEQ ID NO: 5498 |
| A55 | SEQ ID NO: 5599 and SEQ ID |
| | NO: 7739 and SEQ ID NO: 5498 |
| A56 | SEQ ID NO: 5599 and SEQ ID |
| | NO: 7785 and SEQ ID NO: 5498 |
| A57 | SEQ ID NO: 5599 and SEQ ID |
| | NO: 7769 and SEQ ID NO: 5509 |
| A58 | SEQ ID NO: 5599 and SEQ ID |
| | NO: 7771 and SEQ ID NO: 5509 |
| A59 | SEQ ID NO: 5599 and SEQ ID |
| | NO: 7739 and SEQ ID NO: 5509 |
| A60 | SEQ ID NO: 5599 and SEQ ID |
| | NO: 7785 and SEQ ID NO: 5509 |
| A61 | SEQ ID NO: 5600 and SEQ ID |
| | NO: 7769 and SEQ ID NO: 5496 |
| A62 | SEQ ID NO: 5600 and SEQ ID |
| | NO: 7771 and SEQ ID NO: 5496 |
| A63 | SEQ ID NO: 5600 and SEQ ID |
| | NO: 7739 and SEQ ID NO: 5496 |
| A64 | SEQ ID NO: 5600 and SEQ ID |
| | NO: 7785 and SEQ ID NO: 5496 |
| A65 | SEQ ID NO: 5600 and SEQ ID |
| | NO: 7769 and SEQ ID NO: 5498 |
| A66 | SEQ ID NO: 5600 and SEQ ID |
| | NO: 7771 and SEQ ID NO: 5498 |
| A67 | SEQ ID NO: 5600 and SEQ ID |
| | NO: 7739 and SEQ ID NO: 5498 |
| A68 | SEQ ID NO: 5600 and SEQ ID |
| | NO: 7785 and SEQ ID NO: 5498 |
| A69 | SEQ ID NO: 5600 and SEQ ID |
| | NO: 7769 and SEQ ID NO: 5509 |
| A70 | SEQ ID NO: 5600 and SEQ ID |
| | NO: 7771 and SEQ ID NO: 5509 |
| A71 | SEQ ID NO: 5600 and SEQ ID |
| | NO: 7739 and SEQ ID NO: 5509 |
| A72 | SEQ ID NO: 5600 and SEQ ID |
| | NO: 7785 and SEQ ID NO: 5509 |

[1156] Particularly preferred combinations include combination A1 to A4, combination A5 to A8, combination A37 to A40, or combination A41 to A44.

[1157] As described herein, it is contemplated to generate a cell (or population of cells), e.g., an immune effector cell, e.g., a CAR-expressing immune effector cell, e.g., as described herein, which has reduced or eliminated expression of CD3 E, B32M and CIITA. While it is contemplated that gRNAs comprising any targeting domain disclosed herein to each of these targets may be used in combination, particularly preferred targeting domain sequences to be used, for example, in combination are provided in the Table 34 below. In embodiments, each of the gRNA molecules are provided in dual guide RNA format and include a crRNA comprising, e.g., consisting of, the sequence [targeting domain]-SEQ ID NO: 6607, and a tracr comprising, e.g., consisting of, the sequence of SEQ ID NO: 6660. In other embodiments, each of the gRNA molecules are provided in single guide RNA format comprising, e.g., consisting of, the sequence: [targeting domain]-SEQ ID NO: 6601. In other embodiments, each of the gRNA molecules are provided in single guide RNA format comprising, e.g., consisting of, the sequence: [targeting domain]-SEQ ID NO: 7811. In embodiments, one or more of the gRNA molecules, e.g., all of the gRNA molecules, additionally comprise one or more modifications described herein, e.g., comprise one or more, e.g., 3,3′ and/or 5′ phosphorothioate bonds, and/or one or more, e.g., 3,3′ and/or 5′ 2′-OMe modifications. In embodiments, each of the gRNA molecules is complexed with a Cas9 molecule (e.g., described herein) and delivered to the cell (or population of cells, e.g., as described herein) as RNP, e.g., by electroporation. In embodiments, the RNP comprising each gRNA molecule are mixed with the cells and introduced simultaneously, e.g., by a single electroporation step. In other embodiments, the RNP may be introduced sequentially. Where it is contemplated to reduce or eliminate expression of both B32M and CIITA in a cell (such as here), in embodiments the cells may be further engineered to express a NK inhibitory molecule, e.g., as described herein, e.g., an HLA-G:B32M fusion described herein.

TABLE 34
Examples of preferred targeting domains of first, second
and third gRNA molecules that can be used in combination
to reduce or eliminate expression of CD3E, B2M and
CIITA in a cell (as described herein).

| | SEQ ID NO: s of targeting domains |
|---|---|
| Combination | of first gRNA, secondg RNA |
| Number | and third gRNA, respectively |
| B1 | SEQ ID NO: 10729 and SEQ ID |
| | NO: 7769 and SEQ ID NO: 5496 |
| B2 | SEQ ID NO: 10729 and SEQ ID |
| | NO: 7771 and SEQ ID NO: 5496 |
| B3 | SEQ ID NO: 10729 and SEQ ID |
| | NO: 7739 and SEQ ID NO: 5496 |
| B4 | SEQ ID NO: 10729 and SEQ ID |
| | NO: 7785 and SEQ ID NO: 5496 |
| B5 | SEQ ID NO: 10729 and SEQ ID |
| | NO: 7769 and SEQ ID NO: 5498 |
| B6 | SEQ ID NO: 10729 and SEQ ID |
| | NO: 7771 and SEQ ID NO: 5498 |
| B7 | SEQ ID NO: 10729 and SEQ ID |
| | NO: 7739 and SEQ ID NO: 5498 |
| B8 | SEQ ID NO: 10729 and SEQ ID |
| | NO: 7785 and SEQ ID NO: 5498 |
| B9 | SEQ ID NO: 10729 and SEQ ID |
| | NO: 7769 and SEQ ID NO: 5509 |
| B10 | SEQ ID NO: 10729 and SEQ ID |
| | NO: 7771 and SEQ ID NO: 5509 |
| B11 | SEQ ID NO: 10729 and SEQ ID |
| | NO: 7739 and SEQ ID NO: 5509 |
| B12 | SEQ ID NO: 10729 and SEQ ID |
| | NO: 7785 and SEQ ID NO: 5509 |
| B13 | SEQ ID NO: 10719 and SEQ ID |
| | NO: 7769 and SEQ ID NO: 5496 |
| B14 | SEQ ID NO: 10719 and SEQ ID |
| | NO: 7771 and SEQ ID NO: 5496 |
| B15 | SEQ ID NO: 10719 and SEQ ID |
| | NO: 7739 and SEQ ID NO: 5496 |
| B16 | SEQ ID NO: 10719 and SEQ ID |
| | NO: 7785 and SEQ ID NO: 5496 |
| B17 | SEQ ID NO: 10719 and SEQ ID |
| | NO: 7769 and SEQ ID NO: 5498 |
| B18 | SEQ ID NO: 10719 and SEQ ID |
| | NO: 7771 and SEQ ID NO: 5498 |
| B19 | SEQ ID NO: 10719 and SEQ ID |
| | NO: 7739 and SEQ ID NO: 5498 |
| B20 | SEQ ID NO: 10719 and SEQ ID |
| | NO: 7785 and SEQ ID NO: 5498 |
| B21 | SEQ ID NO: 10719 and SEQ ID |
| | NO: 7769 and SEQ ID NO: 5509 |
| B22 | SEQ ID NO: 10719 and SEQ ID |
| | NO: 7771 and SEQ ID NO: 5509 |
| B23 | SEQ ID NO: 10719 and SEQ ID |
| | NO: 7739 and SEQ ID NO: 5509 |
| B24 | SEQ ID NO: 10719 and SEQ ID |
| | NO: 7785 and SEQ ID NO: 5509 |
| B25 | SEQ ID NO: 10764 and SEQ ID |
| | NO: 7769 and SEQ ID NO: 5496 |
| B26 | SEQ ID NO: 10764 and SEQ ID |
| | NO: 7771 and SEQ ID NO: 5496 |
| B27 | SEQ ID NO: 10764 and SEQ ID |
| | NO: 7739 and SEQ ID NO: 5496 |
| B28 | SEQ ID NO: 10764 and SEQ ID |
| | NO: 7785 and SEQ ID NO: 5496 |
| B29 | SEQ ID NO: 10764 and SEQ ID |
| | NO: 7769 and SEQ ID NO: 5498 |
| B30 | SEQ ID NO: 10764 and SEQ ID |
| | NO: 7771 and SEQ ID NO: 5498 |
| B31 | SEQ ID NO: 10764 and SEQ ID |
| | NO: 7739 and SEQ ID NO: 5498 |
| B32 | SEQ ID NO: 10764 and SEQ ID |
| | NO: 7785 and SEQ ID NO: 5498 |
| B33 | SEQ ID NO: 10764 and SEQ ID |
| | NO: 7769 and SEQ ID NO: 5509 |
| B34 | SEQ ID NO: 10764 and SEQ ID |
| | NO: 7771 and SEQ ID NO: 5509 |
| B35 | SEQ ID NO: 10764 and SEQ ID |
| | NO: 7739 and SEQ ID NO: 5509 |
| B36 | SEQ ID NO: 10764 and SEQ ID |
| | NO: 7785 and SEQ ID NO: 5509 |
| B37 | SEQ ID NO: 10689 and SEQ ID |
| | NO: 7769 and SEQ ID NO: 5496 |
| B38 | SEQ ID NO: 10689 and SEQ ID |
| | NO: 7771 and SEQ ID NO: 5496 |
| B39 | SEQ ID NO: 10689 and SEQ ID |
| | NO: 7739 and SEQ ID NO: 5496 |
| B40 | SEQ ID NO: 10689 and SEQ ID |
| | NO: 7785 and SEQ ID NO: 5496 |
| B41 | SEQ ID NO: 10689 and SEQ ID |
| | NO: 7769 and SEQ ID NO: 5498 |
| B42 | SEQ ID NO: 10689 and SEQ ID |
| | NO: 7771 and SEQ ID NO: 5498 |
| B43 | SEQ ID NO: 10689 and SEQ ID |
| | NO: 7739 and SEQ ID NO: 5498 |
| B44 | SEQ ID NO: 10689 and SEQ ID |
| | NO: 7785 and SEQ ID NO: 5498 |
| B45 | SEQ ID NO: 10689 and SEQ ID |
| | NO: 7769 and SEQ ID NO: 5509 |
| B46 | SEQ ID NO: 10689 and SEQ ID |
| | NO: 7771 and SEQ ID NO: 5509 |
| B47 | SEQ ID NO: 10689 and SEQ ID |
| | NO: 7739 and SEQ ID NO: 5509 |
| B48 | SEQ ID NO: 10689 and SEQ ID |
| | NO: 7785 and SEQ ID NO: 5509 |
| B49 | SEQ ID NO: 10701 and SEQ ID |
| | NO: 7769 and SEQ ID NO: 5496 |
| B50 | SEQ ID NO: 10701 and SEQ ID |
| | NO: 7771 and SEQ ID NO: 5496 |
| B51 | SEQ ID NO: 10701 and SEQ ID |
| | NO: 7739 and SEQ ID NO: 5496 |
| B52 | SEQ ID NO: 10701 and SEQ ID |
| | NO: 7785 and SEQ ID NO: 5496 |
| B53 | SEQ ID NO: 10701 and SEQ ID |
| | NO: 7769 and SEQ ID NO: 5498 |
| B54 | SEQ ID NO: 10701 and SEQ ID |
| | NO: 7771 and SEQ ID NO: 5498 |
| B55 | SEQ ID NO: 10701 and SEQ ID |
| | NO: 7739 and SEQ ID NO: 5498 |
| B56 | SEQ ID NO: 10701 and SEQ ID |
| | NO: 7785 and SEQ ID NO: 5498 |
| B57 | SEQ ID NO: 10701 and SEQ ID |
| | NO: 7769 and SEQ ID NO: 5509 |
| B58 | SEQ ID NO: 10701 and SEQ ID |
| | NO: 7771 and SEQ ID NO: 5509 |
| B59 | SEQ ID NO: 10701 and SEQ ID |
| | NO: 7739 and SEQ ID NO: 5509 |
| B60 | SEQ ID NO: 10701 and SEQ ID |
| | NO: 7785 and SEQ ID NO: 5509 |
| B61 | SEQ ID NO: 10700 and SEQ ID |
| | NO: 7769 and SEQ ID NO: 5496 |
| B62 | SEQ ID NO: 10700 and SEQ ID |
| | NO: 7771 and SEQ ID NO: 5496 |
| B63 | SEQ ID NO: 10700 and SEQ ID |
| | NO: 7739 and SEQ ID NO: 5496 |
| B64 | SEQ ID NO: 10700 and SEQ ID |
| | NO: 7785 and SEQ ID NO: 5496 |
| B65 | SEQ ID NO: 10700 and SEQ ID |
| | NO: 7769 and SEQ ID NO: 5498 |
| B66 | SEQ ID NO: 10700 and SEQ ID |
| | NO: 7771 and SEQ ID NO: 5498 |
| B67 | SEQ ID NO: 10700 and SEQ ID |
| | NO: 7739 and SEQ ID NO: 5498 |
| B68 | SEQ ID NO: 10700 and SEQ ID |
| | NO: 7785 and SEQ ID NO: 5498 |
| B69 | SEQ ID NO: 10700 and SEQ ID |
| | NO: 7769 and SEQ ID NO: 5509 |
| B70 | SEQ ID NO: 10700 and SEQ ID |
| | NO: 7771 and SEQ ID NO: 5509 |
| B71 | SEQ ID NO: 10700 and SEQ ID |
| | NO: 7739 and SEQ ID NO: 5509 |
| B72 | SEQ ID NO: 10700 and SEQ ID |
| | NO: 7785 and SEQ ID NO: 5509 |
| B73 | SEQ ID NO: 10722 and SEQ ID |
| | NO: 7769 and SEQ ID NO: 5496 |
| B74 | SEQ ID NO: 10722 and SEQ ID |
| | NO: 7771 and SEQ ID NO: 5496 |
| B75 | SEQ ID NO: 10722 and SEQ ID |
| | NO: 7739 and SEQ ID NO: 5496 |
| B76 | SEQ ID NO: 10722 and SEQ ID |
| | NO: 7785 and SEQ ID NO: 5496 |
| B77 | SEQ ID NO: 10722 and SEQ ID |
| | NO: 7769 and SEQ ID NO: 5498 |
| B78 | SEQ ID NO: 10722 and SEQ ID |
| | NO: 7771 and SEQ ID NO: 5498 |
| B79 | SEQ ID NO: 10722 and SEQ ID |
| | NO: 7739 and SEQ ID NO: 5498 |
| B80 | SEQ ID NO: 10722 and SEQ ID |
| | NO: 7785 and SEQ ID NO: 5498 |
| B81 | SEQ ID NO: 10722 and SEQ ID |
| | NO: 7769 and SEQ ID NO: 5509 |
| B82 | SEQ ID NO: 10722 and SEQ ID |
| | NO: 7771 and SEQ ID NO: 5509 |
| B83 | SEQ ID NO: 10722 and SEQ ID |
| | NO: 7739 and SEQ ID NO: 5509 |
| B84 | SEQ ID NO: 10722 and SEQ ID |
| | NO: 7785 and SEQ ID NO: 5509 |

[1158] As described herein, it is contemplated to generate a cell (or population of cells), e.g., an immune effector cell, e.g., a CAR-expressing immune effector cell, e.g., as described herein, which has reduced or eliminated expression of TRBC, B32M and CIITA. While it is contemplated that gRNAs comprising any targeting domain disclosed herein to each of these targets may be used in combination, particularly preferred targeting domain sequences to be used, for example, in combination are provided in the Table 38 below. In embodiments, each of the gRNA molecules are provided in dual guide RNA format and include a crRNA comprising, e.g., consisting of, the sequence [targeting domain]-SEQ ID NO: 6607, and a tracr comprising, e.g., consisting of, the sequence of SEQ ID NO: 6660. In other embodiments, each of the gRNA molecules are provided in single guide RNA format comprising, e.g., consisting of, the sequence: [targeting domain]-SEQ ID NO: 6601. In other embodiments, each of the gRNA molecules are provided in single guide RNA format comprising, e.g., consisting of, the sequence: [targeting domain]-SEQ ID NO: 7811. In embodiments, one or more of the gRNA molecules, e.g., all of the gRNA molecules, additionally comprise one or more modifications described herein, e.g., comprise one or more, e.g., 3,3′ and/or 5′ phosphorothioate bonds, and/or one or more, e.g., 3,3′ and/or 5′ 2′-OMe modifications. In embodiments, each of the gRNA molecules is complexed with a Cas9 molecule (e.g., described herein) and delivered to the cell (or population of cells, e.g., as described herein) as RNP, e.g., by electroporation. In embodiments, the RNP comprising each gRNA molecule are mixed with the cells and introduced simultaneously, e.g., by a single electroporation step. In other embodiments, the RNP may be introduced sequentially. Where it is contemplated to reduce or eliminate expression of both B32M and CIITA in a cell (such as here), in embodiments the cells may be further engineered to express a NK inhibitory molecule, e.g., as described herein, e.g., an HLA-G:B32M fusion described herein.

TABLE 38
Examples of preferred targeting domains of first, second
and third gRNA molecules that can be used in combination
to reduce or eliminate expression of TRBC, B2M and
CIITA in a cell (as described herein).

| | SEQ ID NO: s of targeting |
|---|---|
| | domains of first gRNA, second |
| Combination | gRNA and third gRNA, |
| Number | respectively |
| F1 | SEQ ID NO: 5719 and SEQ ID NO: |
| | 5496 and SEQ ID NO: 7769 |
| F2 | SEQ ID NO: 5719 and SEQ ID NO: |
| | 5496 and SEQ ID NO: 7771 |
| F3 | SEQ ID NO: 5719 and SEQ ID NO: |
| | 5496 and SEQ ID NO: 7739 |
| F4 | SEQ ID NO: 5719 and SEQ ID NO: |
| | 5496 and SEQ ID NO: 7785 |
| F5 | SEQ ID NO: 5719 and SEQ ID NO: |
| | 5498 and SEQ ID NO: 7769 |
| F6 | SEQ ID NO: 5719 and SEQ ID NO: |
| | 5498 and SEQ ID NO: 7771 |
| F7 | SEQ ID NO: 5719 and SEQ ID NO: |
| | 5498 and SEQ ID NO: 7739 |
| F8 | SEQ ID NO: 5719 and SEQ ID NO: |
| | 5498 and SEQ ID NO: 7785 |
| F9 | SEQ ID NO: 5719 and SEQ ID NO: |
| | 5499 and SEQ ID NO: 7769 |
| F10 | SEQ ID NO: 5719 and SEQ ID NO: |
| | 5499 and SEQ ID NO: 7771 |
| F11 | SEQ ID NO: 5719 and SEQ ID NO: |
| | 5499 and SEQ ID NO: 7739 |
| F12 | SEQ ID NO: 5719 and SEQ ID NO: |
| | 5499 and SEQ ID NO: 7785 |
| F13 | SEQ ID NO: 5694 and SEQ ID NO: |
| | 5496 and SEQ ID NO: 7769 |
| F14 | SEQ ID NO: 5694 and SEQ ID NO: |
| | 5496 and SEQ ID NO: 7771 |
| F15 | SEQ ID NO: 5694 and SEQ ID NO: |
| | 5496 and SEQ ID NO: 7739 |
| F16 | SEQ ID NO: 5694 and SEQ ID NO: |
| | 5496 and SEQ ID NO: 7785 |
| F17 | SEQ ID NO: 5694 and SEQ ID NO: |
| | 5498 and SEQ ID NO: 7769 |
| F18 | SEQ ID NO: 5694 and SEQ ID NO: |
| | 5498 and SEQ ID NO: 7771 |
| F19 | SEQ ID NO: 5694 and SEQ ID NO: |
| | 5498 and SEQ ID NO: 7739 |
| F20 | SEQ ID NO: 5694 and SEQ ID NO: |
| | 5498 and SEQ ID NO: 7785 |
| F21 | SEQ ID NO: 5694 and SEQ ID NO: |
| | 5499 and SEQ ID NO: 7769 |
| F22 | SEQ ID NO: 5694 and SEQ ID NO: |
| | 5499 and SEQ ID NO: 7771 |
| F23 | SEQ ID NO: 5694 and SEQ ID NO: |
| | 5499 and SEQ ID NO: 7739 |
| F24 | SEQ ID NO: 5694 and SEQ ID NO: |
| | 5499 and SEQ ID NO: 7785 |
| F25 | SEQ ID NO: 5706 and SEQ ID NO: |
| | 5496 and SEQ ID NO: 7769 |
| F26 | SEQ ID NO: 5706 and SEQ ID NO: |
| | 5496 and SEQ ID NO: 7771 |
| F27 | SEQ ID NO: 5706 and SEQ ID NO: |
| | 5496 and SEQ ID NO: 7739 |
| F28 | SEQ ID NO: 5706 and SEQ ID NO: |
| | 5496 and SEQ ID NO: 7785 |
| F29 | SEQ ID NO: 5706 and SEQ ID NO: |
| | 5498 and SEQ ID NO: 7769 |
| F30 | SEQ ID NO: 5706 and SEQ ID NO: |
| | 5498 and SEQ ID NO: 7771 |
| F31 | SEQ ID NO: 5706 and SEQ ID NO: |
| | 5498 and SEQ ID NO: 7739 |
| F32 | SEQ ID NO: 5706 and SEQ ID NO: |
| | 5498 and SEQ ID NO: 7785 |
| F33 | SEQ ID NO: 5706 and SEQ ID NO: |
| | 5499 and SEQ ID NO: 7769 |
| F34 | SEQ ID NO: 5706 and SEQ ID NO: |
| | 5499 and SEQ ID NO: 7771 |
| F35 | SEQ ID NO: 5706 and SEQ ID NO: |
| | 5499 and SEQ ID NO: 7739 |
| F36 | SEQ ID NO: 5706 and SEQ ID NO: |
| | 5499 and SEQ ID NO: 7785 |
| F37 | SEQ ID NO: 5696 and SEQ ID NO: |
| | 5496 and SEQ ID NO: 7769 |
| F38 | SEQ ID NO: 5696 and SEQ ID NO: |
| | 5496 and SEQ ID NO: 7771 |
| F39 | SEQ ID NO: 5696 and SEQ ID NO: |
| | 5496 and SEQ ID NO: 7739 |
| F40 | SEQ ID NO: 5696 and SEQ ID NO: |
| | 5496 and SEQ ID NO: 7785 |
| F41 | SEQ ID NO: 5696 and SEQ ID NO: |
| | 5498 and SEQ ID NO: 7769 |
| F42 | SEQ ID NO: 5696 and SEQ ID NO: |
| | 5498 and SEQ ID NO: 7771 |
| F43 | SEQ ID NO: 5696 and SEQ ID NO: |
| | 5498 and SEQ ID NO: 7739 |
| F44 | SEQ ID NO: 5696 and SEQ ID NO: |
| | 5498 and SEQ ID NO: 7785 |
| F45 | SEQ ID NO: 5696 and SEQ ID NO: |
| | 5499 and SEQ ID NO: 7769 |
| F46 | SEQ ID NO: 5696 and SEQ ID NO: |
| | 5499 and SEQ ID NO: 7771 |
| F47 | SEQ ID NO: 5696 and SEQ ID NO: |
| | 5499 and SEQ ID NO: 7739 |
| F48 | SEQ ID NO: 5696 and SEQ ID NO: |
| | 5499 and SEQ ID NO: 7785 |
| F49 | SEQ ID NO: 5711 and SEQ ID NO: |
| | 5496 and SEQ ID NO: 7769 |
| F50 | SEQ ID NO: 5711 and SEQ ID NO: |
| | 5496 and SEQ ID NO: 7771 |
| F51 | SEQ ID NO: 5711 and SEQ ID NO: |
| | 5496 and SEQ ID NO: 7739 |
| F52 | SEQ ID NO: 5711 and SEQ ID NO: |
| | 5496 and SEQ ID NO: 7785 |
| F53 | SEQ ID NO: 5711 and SEQ ID NO: |
| | 5498 and SEQ ID NO: 7769 |
| F54 | SEQ ID NO: 5711 and SEQ ID NO: |
| | 5498 and SEQ ID NO: 7771 |
| F55 | SEQ ID NO: 5711 and SEQ ID NO: |
| | 5498 and SEQ ID NO: 7739 |
| F56 | SEQ ID NO: 5711 and SEQ ID NO: |
| | 5498 and SEQ ID NO: 7785 |
| F57 | SEQ ID NO: 5711 and SEQ ID NO: |
| | 5499 and SEQ ID NO: 7769 |
| F58 | SEQ ID NO: 5711 and SEQ ID NO: |
| | 5499 and SEQ ID NO: 7771 |
| F59 | SEQ ID NO: 5711 and SEQ ID NO: |
| | 5499 and SEQ ID NO: 7739 |
| F60 | SEQ ID NO: 5711 and SEQ ID NO: |
| | 5499 and SEQ ID NO: 7785 |

[1159] Particularly preferred combinations include combination F1 to F4, combination F5 to F8, combination F13 to F16, or combination F17 to F20.

[1160] As described herein, it is contemplated to generate a cell (or population of cells), e.g., an immune effector cell, e.g., a CAR-expressing immune effector cell, e.g., as described herein, which has reduced or eliminated expression of CD3 E and FKBP1A. While it is contemplated that gRNAs comprising any targeting domain disclosed herein to each of these targets may be used in combination, particularly preferred targeting domain sequences to be used, for example, in combination are provided in the Table 35 below. In embodiments, each of the gRNA molecules are provided in dual guide RNA format and include a crRNA comprising, e.g., consisting of, the sequence [targeting domain]-SEQ ID NO: 6607, and a tracr comprising, e.g., consisting of, the sequence of SEQ ID NO: 6660. In other embodiments, each of the gRNA molecules are provided in single guide RNA format comprising, e.g., consisting of, the sequence: [targeting domain]-SEQ ID NO: 6601. In other embodiments, each of the gRNA molecules are provided in single guide RNA format comprising, e.g., consisting of, the sequence: [targeting domain]-SEQ ID NO: 7811. In embodiments, one or more of the gRNA molecules, e.g., all of the gRNA molecules, additionally comprise one or more modifications described herein, e.g., comprise one or more, e.g., 3,3′ and/or 5′ phosphorothioate bonds, and/or one or more, e.g., 3,3′ and/or 5′ 2′-OMe modifications. In embodiments, each of the gRNA molecules is complexed with a Cas9 molecule (e.g., described herein) and delivered to the cell (or population of cells) as RNP, e.g., by electroporation. In embodiments, the RNP comprising each gRNA molecule are mixed with the cells and introduced simultaneously, e.g., by a single electroporation step. In other embodiments, the RNP may be introduced sequentially.

TABLE 35
Examples of preferred targeting domains of first, second
and (optionally) third gRNA molecules that can be used
in combination to reduce or eliminate expression of
CD3E and FKBP1A in a cell (as described herein).

| | SEQ ID NO: s of targeting domains |
|---|---|
| | of first gRNA, second gRNA and, |
| Combination | optionally, third gRNA, |
| Number | respectively |
| C1 | SEQ ID NO: 10729 and SEQ ID NO: |
| | 6693 |
| C2 | SEQ ID NO: 10729 and SEQ ID NO: |
| | 6705 |
| C3 | SEQ ID NO: 10729 and SEQ ID NO: |
| | 6694 |
| C4 | SEQ ID NO: 10729 and SEQ ID NO: |
| | 6708 |
| C5 | SEQ ID NO: 10729 and SEQ ID NO: |
| | 6699 |
| C6 | SEQ ID NO: 10729 and SEQ ID NO: |
| | 6705 and SEQ ID NO: 6694 |
| C7 | SEQ ID NO: 10719 and SEQ ID NO: |
| | 6693 |
| C8 | SEQ ID NO: 10719 and SEQ ID NO: |
| | 6705 |
| C9 | SEQ ID NO: 10719 and SEQ ID NO: |
| | 6694 |
| C10 | SEQ ID NO: 10719 and SEQ ID NO: |
| | 6708 |
| C11 | SEQ ID NO: 10719 and SEQ ID NO: |
| | 6699 |
| C12 | SEQ ID NO: 10719 and SEQ ID NO: |
| | 6705 and SEQ ID NO: 6694 |
| C13 | SEQ ID NO: 10764 and SEQ ID NO: |
| | 6693 |
| C14 | SEQ ID NO: 10764 and SEQ ID NO: |
| | 6705 |
| C15 | SEQ ID NO: 10764 and SEQ ID NO: |
| | 6694 |
| C16 | SEQ ID NO: 10764 and SEQ ID NO: |
| | 6708 |
| C17 | SEQ ID NO: 10764 and SEQ ID NO: |
| | 6699 |
| C18 | SEQ ID NO: 10764 and SEQ ID NO: |
| | 6705 and SEQ ID NO: 6694 |
| C19 | SEQ ID NO: 10689 and SEQ ID NO: |
| | 6693 |
| C20 | SEQ ID NO: 10689 and SEQ ID NO: |
| | 6705 |
| C21 | SEQ ID NO: 10689 and SEQ ID NO: |
| | 6694 |
| C22 | SEQ ID NO: 10689 and SEQ ID NO: |
| | 6708 |
| C23 | SEQ ID NO: 10689 and SEQ ID NO: |
| | 6699 |
| C24 | SEQ ID NO: 10689 and SEQ ID NO: |
| | 6705 and SEQ ID NO: 6694 |
| C25 | SEQ ID NO: 10701 and SEQ ID |
| | NO: 6693 |
| C26 | SEQ ID NO: 10701 and SEQ ID |
| | NO: 6705 |
| C27 | SEQ ID NO: 10701 and SEQ ID |
| | NO: 6694 |
| C28 | SEQ ID NO: 10701 and SEQ ID |
| | NO: 6708 |
| C29 | SEQ ID NO: 10701 and SEQ ID |
| | NO: 6699 |
| C30 | SEQ ID NO: 10701 and SEQ ID |
| | NO: 6705 and SEQ ID NO: 6694 |
| C31 | SEQ ID NO: 10700 and SEQ ID |
| | NO: 6693 |
| C32 | SEQ ID NO: 10700 and SEQ ID |
| | NO: 6705 |
| C33 | SEQ ID NO: 10700 and SEQ ID |
| | NO: 6694 |
| C34 | SEQ ID NO: 10700 and SEQ ID |
| | NO: 6708 |
| C35 | SEQ ID NO: 10700 and SEQ ID |
| | NO: 6699 |
| C36 | SEQ ID NO: 10700 and SEQ ID |
| | NO: 6705 and SEQ ID NO: 6694 |
| C37 | SEQ ID NO: 10722 and SEQ ID |
| | NO: 6693 |
| C38 | SEQ ID NO: 10722 and SEQ ID |
| | NO: 6705 |
| C39 | SEQ ID NO: 10722 and SEQ ID |
| | NO: 6694 |
| C40 | SEQ ID NO: 10722 and SEQ ID |
| | NO: 6708 |
| C41 | SEQ ID NO: 10722 and SEQ ID |
| | NO: 6699 |
| C42 | SEQ ID NO: 10722 and SEQ ID |
| | NO: 6705 and SEQ ID NO: 6694 |

[1161] As described herein, it is contemplated to generate a cell (or population of cells), e.g., an immune effector cell, e.g., a CAR-expressing immune effector cell, e.g., as described herein, which has reduced or eliminated expression of TRAC and FKBP1A. While it is contemplated that gRNAs comprising any targeting domain disclosed herein to each of these targets may be used in combination, particularly preferred targeting domain sequences to be used, for example, in combination are provided in the Table 36 below. In embodiments, each of the gRNA molecules are provided in dual guide RNA format and include a crRNA comprising, e.g., consisting of, the sequence [targeting domain]-SEQ ID NO: 6607, and a tracr comprising, e.g., consisting of, the sequence of SEQ ID NO: 6660. In other embodiments, each of the gRNA molecules are provided in single guide RNA format comprising, e.g., consisting of, the sequence: [targeting domain]-SEQ ID NO: 6601. In other embodiments, each of the gRNA molecules are provided in single guide RNA format comprising, e.g., consisting of, the sequence: [targeting domain]-SEQ ID NO: 7811. In embodiments, one or more of the gRNA molecules, e.g., all of the gRNA molecules, additionally comprise one or more modifications described herein, e.g., comprise one or more, e.g., 3,3′ and/or 5′ phosphorothioate bonds, and/or one or more, e.g., 3,3′ and/or 5′ 2′-OMe modifications. In embodiments, each of the gRNA molecules is complexed with a Cas9 molecule (e.g., described herein) and delivered to the cell (or population of cells, e.g., as described herein) as RNP, e.g., by electroporation. In embodiments, the RNP comprising each gRNA molecule are mixed with the cells and introduced simultaneously, e.g., by a single electroporation step. In other embodiments, the RNP may be introduced sequentially.

TABLE 36
Examples of preferred targeting domains of first, second
and (optionally) third gRNA molecules that can be used
in combination to reduce or eliminate expression of
TRAC and FKBP1A in a cell (as described herein).

| | SEQ ID NO: s of targeting |
|---|---|
| | domains of first gRNA, second |
| Combination | gRNA and, optionally, third |
| Number | gRNA, respectively |
| D1 | SEQ ID NO: 5569 and SEQ ID |
| | NO: 6693 |
| D2 | SEQ ID NO: 5569 and SEQ ID |
| | NO: 6705 |
| D3 | SEQ ID NO: 5569 and SEQ ID |
| | NO: 6694 |
| D4 | SEQ ID NO: 5569 and SEQ ID |
| | NO: 6708 |
| D5 | SEQ ID NO: 5569 and SEQ ID |
| | NO: 6699 |
| D6 | SEQ ID NO: 5569 and SEQ ID NO: |
| | 6705 and SEQ ID NO: 6694 |
| D7 | SEQ ID NO: 5586 and SEQ ID |
| | NO: 6693 |
| D8 | SEQ ID NO: 5586 and SEQ ID |
| | NO: 6705 |
| D9 | SEQ ID NO: 5586 and SEQ ID |
| | NO: 6694 |
| D10 | SEQ ID NO: 5586 and SEQ ID |
| | NO: 6708 |
| D11 | SEQ ID NO: 5586 and SEQ ID |
| | NO: 6699 |
| D12 | SEQ ID NO: 5586 and SEQ ID NO: |
| | 6705 and SEQ ID NO: 6694 |
| D13 | SEQ ID NO: 5587 and SEQ ID |
| | NO: 6693 |
| D14 | SEQ ID NO: 5587 and SEQ ID |
| | NO: 6705 |
| D15 | SEQ ID NO: 5587 and SEQ ID |
| | NO: 6694 |
| D16 | SEQ ID NO: 5587 and SEQ ID |
| | NO: 6708 |
| D17 | SEQ ID NO: 5587 and SEQ ID |
| | NO: 6699 |
| D18 | SEQ ID NO: 5587 and SEQ ID NO: |
| | 6705 and SEQ ID NO: 6694 |
| D19 | SEQ ID NO: 5592 and SEQ ID NO: |
| | 6693 |
| D20 | SEQ ID NO: 5592 and SEQ ID NO: |
| | 6705 |
| D21 | SEQ ID NO: 5592 and SEQ ID NO: |
| | 6694 |
| D22 | SEQ ID NO: 5592 and SEQ ID NO: |
| | 6708 |
| D23 | SEQ ID NO: 5592 and SEQ ID NO: |
| | 6699 |
| D24 | SEQ ID NO: 5592 and SEQ ID NO: |
| | 6705 and SEQ ID NO: 6694 |
| D25 | SEQ ID NO: 5599 and SEQ ID NO: |
| | 6693 |
| D26 | SEQ ID NO: 5599 and SEQ ID NO: |
| | 6705 |
| D27 | SEQ ID NO: 5599 and SEQ ID NO: |
| | 6694 |
| D28 | SEQ ID NO: 5599 and SEQ ID NO: |
| | 6708 |
| D29 | SEQ ID NO: 5599 and SEQ ID NO: |
| | 6699 |
| D30 | SEQ ID NO: 5599 and SEQ ID NO: |
| | 6705 and SEQ ID NO: 6694 |
| D31 | SEQ ID NO: 5600 and SEQ ID NO: |
| | 6693 |
| D32 | SEQ ID NO: 5600 and SEQ ID NO: |
| | 6705 |
| D33 | SEQ ID NO: 5600 and SEQ ID NO: |
| | 6694 |
| D34 | SEQ ID NO: 5600 and SEQ ID NO: |
| | 6708 |
| D35 | SEQ ID NO: 5600 and SEQ ID NO: |
| | 6699 |
| D36 | SEQ ID NO: 5600 and SEQ ID NO: |
| | 6705 and SEQ ID NO: 6694 |

[1162] Particularly preferred combinations include combination D2, combination D4, combination D20, or combination D22.

[1163] As described herein, it is contemplated to generate a cell (or population of cells), e.g., an immune effector cell, e.g., a CAR-expressing immune effector cell, e.g., as described herein, which has reduced or eliminated expression of TRBC and FKBP1A. While it is contemplated that gRNAs comprising any targeting domain disclosed herein to each of these targets may be used in combination, particularly preferred targeting domain sequences to be used, for example, in combination are provided in the Table 37 below. In embodiments, each of the gRNA molecules are provided in dual guide RNA format and include a crRNA comprising, e.g., consisting of, the sequence [targeting domain]-SEQ ID NO: 6607, and a tracr comprising, e.g., consisting of, the sequence of SEQ ID NO: 6660. In other embodiments, each of the gRNA molecules are provided in single guide RNA format comprising, e.g., consisting of, the sequence: [targeting domain]-SEQ ID NO: 6601. In other embodiments, each of the gRNA molecules are provided in single guide RNA format comprising, e.g., consisting of, the sequence: [targeting domain]-SEQ ID NO: 7811. In embodiments, one or more of the gRNA molecules, e.g., all of the gRNA molecules, additionally comprise one or more modifications described herein, e.g., comprise one or more, e.g., 3,3′ and/or 5′ phosphorothioate bonds, and/or one or more, e.g., 3,3′ and/or 5′ 2′-OMe modifications. In embodiments, each of the gRNA molecules is complexed with a Cas9 molecule (e.g., described herein) and delivered to the cell (or population of cells) as RNP, e.g., by electroporation. In embodiments, the RNP comprising each gRNA molecule are mixed with the cells and introduced simultaneously, e.g., by a single electroporation step. In other embodiments, the RNP may be introduced sequentially.

TABLE 37
Examples of preferred targeting domains of first, second
and (optionally) third gRNA molecules that can be used
in combination to reduce or eliminate expression of
TRBC and FKBP1A in a cell (as described herein).

| | SEQ ID NO: s of targeting |
|---|---|
| | domains of first gRNA, |
| Combination | second gRNA and, optionally, |
| Number | third gRNA, respectively |
| E1 | SEQ ID NO: 5719 and SEQ ID |
| | NO: 6693 |
| E2 | SEQ ID NO: 5719 and SEQ ID |
| | NO: 6705 |
| E3 | SEQ ID NO: 5719 and SEQ ID |
| | NO: 6694 |
| E4 | SEQ ID NO: 5719 and SEQ ID |
| | NO: 6708 |
| E5 | SEQ ID NO: 5719 and SEQ ID |
| | NO: 6699 |
| E6 | SEQ ID NO: 5719 and SEQ ID NO: |
| | 6705 and SEQ ID NO: 6694 |
| E7 | SEQ ID NO: 5694 and SEQ ID |
| | NO: 6693 |
| E8 | SEQ ID NO: 5694 and SEQ ID |
| | NO: 6705 |
| E9 | SEQ ID NO: 5694 and SEQ ID |
| | NO: 6694 |
| E10 | SEQ ID NO: 5694 and SEQ ID |
| | NO: 6708 |
| E11 | SEQ ID NO: 5694 and SEQ ID |
| | NO: 6699 |
| E12 | SEQ ID NO: 5694 and SEQ ID NO: |
| | 6705 and SEQ ID NO: 6694 |
| E13 | SEQ ID NO: 5706 and SEQ ID |
| | NO: 6693 |
| E14 | SEQ ID NO: 5706 and SEQ ID |
| | NO: 6705 |
| E15 | SEQ ID NO: 5706 and SEQ ID |
| | NO: 6694 |
| E16 | SEQ ID NO: 5706 and SEQ ID |
| | NO: 6708 |
| E17 | SEQ ID NO: 5706 and SEQ ID |
| | NO: 6699 |
| E18 | SEQ ID NO: 5706 and SEQ ID NO: |
| | 6705 and SEQ ID NO: 6694 |
| E19 | SEQ ID NO: 5696 and SEQ ID |
| | NO: 6693 |
| E20 | SEQ ID NO: 5696 and SEQ ID |
| | NO: 6705 |
| E21 | SEQ ID NO: 5696 and SEQ ID |
| | NO: 6694 |
| E22 | SEQ ID NO: 5696 and SEQ ID |
| | NO: 6708 |
| E23 | SEQ ID NO: 5696 and SEQ ID |
| | NO: 6699 |
| E24 | SEQ ID NO: 5696 and SEQ ID NO: |
| | 6705 and SEQ ID NO: 6694 |
| E25 | SEQ ID NO: 5711 and SEQ ID |
| | NO: 6693 |
| E26 | SEQ ID NO: 5711 and SEQ ID |
| | NO: 6705 |
| E27 | SEQ ID NO: 5711 and SEQ ID |
| | NO: 6694 |
| E28 | SEQ ID NO: 5711 and SEQ ID |
| | NO: 6708 |
| E29 | SEQ ID NO: 5711 and SEQ ID |
| | NO: 6699 |
| E30 | SEQ ID NO: 5711 and SEQ ID NO: |
| | 6705 and SEQ ID NO: 6694 |

[1164] Particularly preferred combinations include combination E2, combination E4, combination E8, or combination E10.

[1165] While not intending to be bound by theory, it has also been surprisingly shown herein that the targeting of two or more target sequences located within different genes may induce mutations (e.g., insertions or deletions or one or more nucleic acid residues) at each of the targeted sites, thereby reducing or eliminating expression of two or more proteins within the cell. Combinations of gRNAs targeting two or more different genes of interest are described herein.

[1166] As described herein, when utilizing more than one gRNA molecule (or CRISPR system comprising more than one gRNA molecule, e.g., a CRISPR system comprising a first gRNA molecule and a CRISPR system comprising a second gRNA molecule, e.g., wherein each gRNA molecule is complexed with a Cas molecule, e.g., a Cas9 molecule, e.g., as described herein), the more than one gRNA molecules may be introduced into a cell simultaneously, e.g., in a single introduction step, e.g., a single electroporation step. Alternatively, the more than one gRNA molecules (or CRISPR systems comprising said gRNA molecules) can be introduced into a cell in more than one steps, e.g., more than one electroporations. If multiple introduction steps are utilized, the steps may be separated by a period of hours, days, or weeks, e.g., by a period of 1 hour, 2 hours, 5 hours, 10 hours, 15 hours, 20 hours, 24 hours, 2 days, 3, days, 4 days, 5 days, 6 days, 7 days, 8 days, 9 days, 10 days, or more.

### IX. Properties of the gRNA

[1167] It has further been surprisingly shown herein that gRNA molecules and CRISPR systems comprising said gRNA molecules produce similar or identical indel patterns in different cell types, across different methods of delivery and using different crRNA/tracr components. Without being bound by theory, it is believed that some indel patterns may be more advantageous than others. For example, indels which predominantly include insertions and/or deletions which result in a “frameshift mutation” (e.g., 1- or 2-base pair insertion or deletions, or any insertion or deletion where n/3 is not a whole number (where n=the number of nucleotides in the insertion or deletion)) may be beneficial in reducing or eliminating expression of a functional protein. Likewise, indels which predominantly include “large deletions” (deletions of more than 10, 11, 12, 13, 14, 15, 20, 25, or 30 nucleotides) may also be beneficial in, for example, removing critical regulatory sequences such as promoter binding sites, which may similarly have an improved effect on expression of functional protein. While the indel patterns induced by a given gRNA/CRISPR system have surprisingly been found to be consistently reproduced across cell types, as described herein, not any single indel structure will inevitably be produced in a given cell upon introduction of a gRNA/CRISPR system.

[1168] The invention thus provides for gRNA molecules which create a beneficial indel pattern or structure, for example, which have indel patterns or structures predominantly composed of frameshift mutation(s) and/or large deletions. Such gRNA molecules may be selected by assessing the indel pattern or structure created by a candidate gRNA molecule in a test cell (for example, a HEK293 cell or in the cell of interest, e.g., a T cell) by NGS, as described herein. As shown in the Examples, gRNA molecules have been discovered, which, when introduced into the desired cell population, result in a population of cells comprising a significant fraction of the cells having a frameshift mutation in the targeted gene. In some cases, the rate of frameshift mutation is as high as 75%, 80%, 85%, 90% or more. The invention thus provides for populations of cells which comprise at least about 40% of cells (e.g., at least about 45%, at least about 50%, at least about 55%, at least about 60%, at least about 65%, at least about 70%, at least about 75%, at least about 80%, at least about 85%, at least about 90%, at least about 95%, or at least about 99%) having a frameshift mutation, e.g., as described herein, at or near the target site of a gRNA molecule described herein. The invention also provides for populations of cells which comprise at least about 50% of cells (e.g., at least about 55%, at least about 60%, at least about 65%, at least about 70%, at least about 75%, at least about 80%, at least about 85%, at least about 90%, at least about 95%, or at least about 99%) having a frameshift mutation, e.g., as described herein, at or near the target site of a gRNA molecule described herein.

[1169] The invention thus provides methods of selecting gRNA molecules for use in the therapeutic methods of the invention comprising: 1) providing a plurality of gRNA molecules to a target of interest, 2) assessing the indel pattern or structure created by use of said gRNA molecules, 3) selecting a gRNA molecule that forms an indel pattern or structure composed predominantly of frameshift mutations, large deletions or a combination thereof, and 4) using said selected gRNA in a methods of the invention.

[1170] The invention further provides methods of altering cells, and altered cells, wherein a particular indel pattern is constantly produced with a given gRNA/CRISPR system in that cell type. The indel patterns, including the top 5 most frequently occurring indels observed with the gRNA/CRISPR systems described herein are disclosed, for example, in the Examples. As shown in the examples, populations of cells are generated, wherein a significant fraction of the cells comprises one of the top 5 indels (for example, populations of cells wherein one of the top 5 indels is present in more than 30%, more than 40%, more than 50%, more than 60% or more of the cells of the population. Thus, the invention provides cells, e.g., immune effector cells, e.g., CAR-expressing immune effector cells (as described herein), which comprise an indel of any one of the top 5 indels observed with a given gRNA/CRISPR system. Further, the invention provides populations of cells, e.g., immune effector cells, e.g., CAR-expressing immune effector cells (as described herein), which when assessed by, for example, NGS, comprise a high percentage of cells comprising one of the top 5 indels described herein for a given gRNA/CRISPR system. When used in connection with indel pattern analysis, a “high percentage” refers to at least about 50% (e.g., at least about 55%, at least about 60%, at least about 65%, at least about 70%, at least about 75%, at least about 80%, at least about 85%, at least about 90%, at least about 95%, or at least about 99%) of the cells of the population comprising one of the top 5 indels described herein for a given gRNA/CRISPR system. In other embodiments, the population of cells comprises at least about 25% (e.g., from about 25% to about 60%, e.g., from about 25% to about 50%, e.g., from about 25% to about 40%, e.g., from about 25% to about 35%) of cells which have one of the top 5 indels described herein for a given gRNA/CRISPR system. In embodiments, the top 5 indels for a given gRNA/CRISPR system which targets TRAC are provided in FIG. 34A, FIG. 34B and FIG. 49. In embodiments, the top 5 indels for a given gRNA/CRISPR system which targets B2M are provided in FIG. 36 and FIG. 48. In embodiments, the top 5 indels for a given gRNA/CRISPR system which targets CIITA are provided in FIG. 38, FIG. 41, FIG. 44, and FIG. 50. In embodiments, the top 5 indels for a given gRNA/CRISPR system which targets FKBP1A are provided in FIG. 53.

[1171] It has also been discovered that certain gRNA molecules do not create indels at off-target sequences within the genome of the target cell type, or produce indels at off target sites at very low frequencies (e.g., <5% of cells within a population) relative to the frequency of indel creation at the target site. Thus, the invention provides for gRNA molecules and CRISPR systems which do not exhibit off-target indel formation in the target cell type, or which produce a frequency of off-target indel formation of <5%. In embodiments, the invention provides gRNA molecules and CRISPR systems which do not exhibit any off target indel formation in the target cell type. Thus, the invention further provides a cell, e.g., a population of cells, e.g., immune effector cells, e.g., CAR-expressing immune effector cells, e.g., as described herein, which comprise an indel at or near a target site of a gRNA molecule described herein (e.g., a frameshift indel, or any one of the top 5 indels produced by a given gRNA/CRISPR system, e.g., as described herein), but does not comprise an indel at any off-target site of the gRNA molecule. In other embodiments, the invention further provides a population of cells, e.g., immune effector cells, e.g., CAR-expressing immune effector cells, e.g., as described herein, which comprises >50% of cells which have an indel at or near a target site of a gRNA molecule described herein (e.g., a frameshift indel, or any one of the top 5 indels produced by a given gRNA/CRISPR system, e.g., as described herein), but which comprises less than 5%, e.g., less than 4%, less than 3%, less than 2% or less than 1%, of cells comprising an indel at any off-target site of the gRNA molecule.

### X. Delivery/Constructs

[1172] The components, e.g., a Cas9 molecule or gRNA molecule, or both, can be delivered, formulated, or administered in a variety of forms. As a non-limiting example, the gRNA molecule and Cas9 molecule can be formulated (in one or more compositions), directly delivered or administered to a cell in which a genome editing event is desired. Alternatively, nucleic acid encoding one or more components, e.g., a Cas9 molecule or gRNA molecule, or both, can be formulated (in one or more compositions), delivered or administered. In one aspect, the gRNA molecule is provided as DNA encoding the gRNA molecule and the Cas9 molecule is provided as DNA encoding the Cas9 molecule. In one embodiment, the gRNA molecule and Cas9 molecule are encoded on separate nucleic acid molecules. In one embodiment, the gRNA molecule and Cas9 molecule are encoded on the same nucleic acid molecule. In one aspect, the gRNA molecule is provided as RNA and the Cas9 molecule is provided as DNA encoding the Cas9 molecule. In one embodiment, the gRNA molecule is provided with one or more modifications, e.g., as described herein. In one aspect, the gRNA molecule is provided as RNA and the Cas9 molecule is provided as mRNA encoding the Cas9 molecule. In one aspect, the gRNA molecule is provided as RNA and the Cas9 molecule is provided as a protein. In one embodiment, the gRNA and Cas9 molecule are provided as a ribonuclear protein complex (RNP). In one aspect, the gRNA molecule is provided as DNA encoding the gRNA molecule and the Cas9 molecule is provided as a protein.

[1173] Delivery may be accomplished by, for example, electroporation (e.g., as known in the art) or other method that renders the cell membrane permeable to nucleic acid and/or polypeptide molecules. Additional techniques for rendering the membrane permeable are known in the art and include, for example, cell squeezing (e.g., as described in WO2015/023982 and WO2013/059343, the contents of which are hereby incorporated by reference in their entirety), nanoneedles (e.g., as described in Chiappini et al., Nat. Mat., 14; 532-39, or US2014/0295558, the contents of which are hereby incorporated by reference in their entirety) and nanostraws (e.g., as described in Xie, ACS Nano, 7(5); 4351-58, the contents of which are hereby incorporated by reference in their entirety).

[1174] When a component is delivered encoded in DNA the DNA will typically include a control region, e.g., comprising a promoter, to effect expression. Useful promoters for Cas9 molecule sequences include CMV, EF-1 alpha, MSCV, PGK, CAG control promoters. Useful promoters for gRNAs include H1, EF-1α and U6 promoters. Promoters with similar or dissimilar strengths can be selected to tune the expression of components. Sequences encoding a Cas9 molecule can comprise a nuclear localization signal (NLS), e.g., an SV40 NLS. In an embodiment, a promoter for a Cas9 molecule or a gRNA molecule can be, independently, inducible, tissue specific, or cell specific.

DNA-Based Delivery of a Cas9 Molecule and or a gRNA Molecule

[1175] DNA encoding Cas9 molecules and/or gRNA molecules, can be administered to subjects or delivered into cells by art-known methods or as described herein. For example, Cas9-encoding and/or gRNA-encoding DNA can be delivered, e.g., by vectors (e.g., viral or non-viral vectors), non-vector based methods (e.g., using naked DNA or DNA complexes), or a combination thereof.

[1176] In some embodiments, the Cas9- and/or gRNA-encoding DNA is delivered by a vector (e.g., viral vector/virus, plasmid, minicircle or nanoplasmid).

[1177] A vector can comprise a sequence that encodes a Cas9 molecule and/or a gRNA molecule. A vector can also comprise a sequence encoding a signal peptide (e.g., for nuclear localization, nucleolar localization, mitochondrial localization), fused, e.g., to a Cas9 molecule sequence. For example, a vector can comprise one or more nuclear localization sequence (e.g., from SV40) fused to the sequence encoding the Cas9 molecule.

[1178] One or more regulatory/control elements, e.g., a promoter, an enhancer, an intron, a polyadenylation signal, a Kozak consensus sequence, internal ribosome entry sites (IRES), a 2A sequence, and a splice acceptor or donor can be included in the vectors. In some embodiments, the promoter is recognized by RNA polymerase II (e.g., a CMV promoter). In other embodiments, the promoter is recognized by RNA polymerase III (e.g., a U6 promoter). In some embodiments, the promoter is a regulated promoter (e.g., inducible promoter). In other embodiments, the promoter is a constitutive promoter. In some embodiments, the promoter is a tissue specific promoter. In some embodiments, the promoter is a viral promoter. In other embodiments, the promoter is a non-viral promoter.

[1179] In some embodiments, the vector or delivery vehicle is a minicircle. In some embodiments, the vector or delivery vehicle is a nanoplasmid.

[1180] In some embodiments, the vector or delivery vehicle is a viral vector (e.g., for generation of recombinant viruses). In some embodiments, the virus is a DNA virus (e.g., dsDNA or ssDNA virus). In other embodiments, the virus is an RNA virus (e.g., an ssRNA virus).

[1181] Exemplary viral vectors/viruses include, e.g., retroviruses, lentiviruses, adenovirus, adeno-associated virus (AAV), vaccinia viruses, poxviruses, and herpes simplex viruses. Viral vector technology is well known in the art and is described, for example, in Sambrook et al., 2012, MOLECULAR CLONING: A LABORATORY MANUAL, volumes 1-4, Cold Spring Harbor Press, NY), and in other virology and molecular biology manuals.

[1182] In some embodiments, the virus infects dividing cells. In other embodiments, the virus infects non-dividing cells. In some embodiments, the virus infects both dividing and non-dividing cells. In some embodiments, the virus can integrate into the host genome. In some embodiments, the virus is engineered to have reduced immunity, e.g., in human. In some embodiments, the virus is replication-competent. In other embodiments, the virus is replication-defective, e.g., having one or more coding regions for the genes necessary for additional rounds of virion replication and/or packaging replaced with other genes or deleted. In some embodiments, the virus causes transient expression of the Cas9 molecule and/or the gRNA molecule. In other embodiments, the virus causes long-lasting, e.g., at least 1 week, 2 weeks, 1 month, 2 months, 3 months, 6 months, 9 months, 1 year, 2 years, or permanent expression, of the Cas9 molecule and/or the gRNA molecule. The packaging capacity of the viruses may vary, e.g., from at least about 4 kb to at least about 30 kb, e.g., at least about 5 kb, 10 kb, 15 kb, 20 kb, 25 kb, 30 kb, 35 kb, 40 kb, 45 kb, or 50 kb.

[1183] In some embodiments, the Cas9- and/or gRNA-encoding DNA is delivered by a recombinant retrovirus. In some embodiments, the retrovirus (e.g., Moloney murine leukemia vims) comprises a reverse transcriptase, e.g., that allows integration into the host genome. In some embodiments, the retrovirus is replication-competent. In other embodiments, the retrovirus is replication-defective, e.g., having one of more coding regions for the genes necessary for additional rounds of virion replication and packaging replaced with other genes, or deleted.

[1184] In some embodiments, the Cas9- and/or gRNA-encoding DNA is delivered by a recombinant lentivirus. For example, the lentivirus is replication-defective, e.g., does not comprise one or more genes required for viral replication.

[1185] In some embodiments, the Cas9- and/or gRNA-encoding DNA is delivered by a recombinant adenovirus.

[1186] In some embodiments, the adenovirus is engineered to have reduced immunity in human.

[1187] In some embodiments, the Cas9- and/or gRNA-encoding DNA is delivered by a recombinant AAV. In some embodiments, the AAV can incorporate its genome into that of a host cell, e.g., a target cell as described herein. In some embodiments, the AAV is a self-complementary adeno-associated virus (scAAV), e.g., a scAAV that packages both strands which anneal together to form double stranded DNA. AAV serotypes that may be used in the disclosed methods include, e.g., AAV1, AAV2, modified AAV2 (e.g., modifications at Y444F, Y500F, Y730F and/or S662V), AAV3, modified AAV3 (e.g., modifications at Y705F, Y73 1 F and/or. T492V), AAV4, AAV5, AAV6, modified AAV6 (e.g., modifications at S663V and/or T492V), AAV8. AAV 8.2, AAV9, AAV rh 10, and pseudotyped AAV, such as AAV2/8, AAV2/5 and AAV2/6 can also be used in the disclosed methods.

[1188] In some embodiments, the Cas9- and/or gRNA-encoding DNA is delivered by a hybrid virus, e.g., a hybrid of one or more of the viruses described herein.

[1189] A Packaging cell is used to form a virus particle that is capable of infecting a host or target cell. Such a cell includes a 293 cell, which can package adenovirus, and a ψ2 cell or a PA317 cell, which can package retrovirus. A viral vector used in gene therapy is usually generated by a producer cell line that packages a nucleic acid vector into a viral particle. The vector typically contains the minimal viral sequences required for packaging and subsequent integration into a host or target cell (if applicable), with other viral sequences being replaced by an expression cassette encoding the protein to be expressed. For example, an AAV vector used in gene therapy typically only possesses inverted terminal repeat (ITR) sequences from the AAV genome which are required for packaging and gene expression in the host or target cell. The missing viral functions are supplied in trans by the packaging cell line. Henceforth, the viral DNA is packaged in a cell line, which contains a helper plasmid encoding the other AAV genes, namely rep and cap, but lacking ITR sequences. The cell line is also infected with adenovirus as a helper. The helper virus promotes replication of the AAV vector and expression of AAV genes from the helper plasmid. The helper plasmid is not packaged in significant amounts due to a lack of ITR sequences. Contamination with adenovirus can be reduced by, e.g., heat treatment to which adenovirus is more sensitive than AAV.

[1190] In an embodiment, the viral vector has the ability of cell type and/or tissue type recognition. For example, the viral vector can be pseudotyped with a different/alternative viral envelope glycoprotein; engineered with a cell type-specific receptor (e.g., genetic modification of the viral envelope glycoproteins to incorporate targeting ligands such as a peptide ligand, a single chain antibodies, a growth factor); and/or engineered to have a molecular bridge with dual specificities with one end recognizing a viral glycoprotein and the other end recognizing a moiety of the target cell surface (e.g., ligand-receptor, monoclonal antibody, avidin-biotin and chemical conjugation).

[1191] In an embodiment, the viral vector achieves cell type specific expression. For example, a tissue-specific promoter can be constructed to restrict expression of the transgene (Cas 9 and gRNA) in only the target cell. The specificity of the vector can also be mediated by microRNA-dependent control of transgene expression. In an embodiment, the viral vector has increased efficiency of fusion of the viral vector and a target cell membrane. For example, a fusion protein such as fusion-competent hemagglutinin (HA) can be incorporated to increase viral uptake into cells. In an embodiment, the viral vector has the ability of nuclear localization. For example, a virus that requires the breakdown of the cell wall (during cell division) and therefore will not infect a non-diving cell can be altered to incorporate a nuclear localization peptide in the matrix protein of the virus thereby enabling the transduction of non-proliferating cells.

[1192] In some embodiments, the Cas9- and/or gRNA-encoding DNA is delivered by a non-vector based method (e.g., using naked DNA or DNA complexes). For example, the DNA can be delivered, e.g., by organically modified silica or silicate (Ormosil), electroporation, gene gun, sonoporation, magnetofection, lipid-mediated transfection, dendrimers, inorganic nanoparticles, calcium phosphates, or a combination thereof.

[1193] In some embodiments, the Cas9- and/or gRNA-encoding DNA is delivered by a combination of a vector and a non-vector based method. For example, a virosome comprises a liposome combined with an inactivated virus (e.g., HIV or influenza virus), which can result in more efficient gene transfer, e.g., in a respiratory epithelial cell than either a viral or a liposomal method alone.

[1194] In an embodiment, the delivery vehicle is a non-viral vector. In an embodiment, the non-viral vector is an inorganic nanoparticle (e.g., attached to the payload to the surface of the nanoparticle). Exemplary inorganic nanoparticles include, e.g., magnetic nanoparticles (e.g., Fe lvln0₂), or silica. The outer surface of the nanoparticle can be conjugated with a positively charged polymer (e.g., polyethylenimine, polylysine, polyserine) which allows for attachment (e.g., conjugation or entrapment) of payload. In an embodiment, the non-viral vector is an organic nanoparticle (e.g., entrapment of the payload inside the nanoparticle). Exemplary organic nanoparticles include, e.g., SNALP liposomes that contain cationic lipids together with neutral helper lipids which are coated with polyethylene glycol (PEG) and protamine and nucleic acid complex coated with lipid coating.

[1195] Exemplary lipids and/or polymers for transfer of CRISPR systems or nucleic acid, e.g., vectors, encoding CRISPR systems or components thereof include, for example, those described in WO2011/076807, WO2014/136086, WO2005/060697, WO2014/140211, WO2012/031046, WO2013/103467, WO2013/006825, WO2012/006378, WO2015/095340, and WO2015/095346, the contents of each of the foregoing are hereby incorporated by reference in their entirety. In an embodiment, the vehicle has targeting modifications to increase target cell update of nanoparticles and liposomes, e.g., cell specific antigens, monoclonal antibodies, single chain antibodies, aptamers, polymers, sugars, and cell penetrating peptides. In an embodiment, the vehicle uses fusogenic and endosome-destabilizing peptides/polymers. In an embodiment, the vehicle undergoes acid-triggered conformational changes (e.g., to accelerate endosomal escape of the cargo). In an embodiment, a stimuli-cleavable polymer is used, e.g., for release in a cellular compartment. For example, disulfide-based cationic polymers that are cleaved in the reducing cellular environment can be used.

[1196] In an embodiment, the delivery vehicle is a biological non-viral delivery vehicle. In an embodiment, the vehicle is an attenuated bacterium (e.g., naturally or artificially engineered to be invasive but attenuated to prevent pathogenesis and expressing the transgene (e.g., Listeria monocytogenes, certain Salmonella strains, Bifidobacterium longum, and modified Escherichia coli), bacteria having nutritional and tissue-specific tropism to target specific tissues, bacteria having modified surface proteins to alter target tissue specificity). In an embodiment, the vehicle is a genetically modified bacteriophage (e.g., engineered phages having large packaging capacity, less immunogenic, containing mammalian plasmid maintenance sequences and having incorporated targeting ligands). In an embodiment, the vehicle is a mammalian virus-like particle. For example, modified viral particles can be generated (e.g., by purification of the “empty” particles followed by ex vivo assembly of the virus with the desired cargo). The vehicle can also be engineered to incorporate targeting ligands to alter target tissue specificity. In an embodiment, the vehicle is a biological liposome. For example, the biological liposome is a phospholipid-based particle derived from human cells (e.g., erythrocyte ghosts, which are red blood cells broken down into spherical structures derived from the subject (e.g., tissue targeting can be achieved by attachment of various tissue or cell-specific ligands), or secretory exosomes—subject (i.e., patient) derived membrane-bound nanovesicle (30-100 nm) of endocytic origin (e.g., can be produced from various cell types and can therefore be taken up by cells without the need of for targeting ligands).

[1197] In an embodiment, one or more nucleic acid molecules (e.g., DNA molecules) other than the components of a Cas system, e.g., the Cas9 molecule component and/or the gRNA molecule component described herein, are delivered. In an embodiment, the nucleic acid molecule is delivered at the same time as one or more of the components of the Cas system are delivered. In an embodiment, the nucleic acid molecule is delivered before or after (e.g., less than about 30 minutes, 1 hour, 2 hours, 3 hours, 6 hours, 9 hours, 12 hours, 1 day, 2 days, 3 days, 1 week, 2 weeks, or 4 weeks) one or more of the components of the Cas9 system are delivered. In an embodiment, the nucleic acid molecule is delivered by a different means than one or more of the components of the Cas9 system, e.g., the Cas9 molecule component and/or the gRNA molecule component, are delivered. The nucleic acid molecule can be delivered by any of the delivery methods described herein. For example, the nucleic acid molecule can be delivered by a viral vector, e.g., an integration-deficient lentivirus, and the Cas9 molecule component and/or the gRNA molecule component can be delivered by electroporation, e.g., such that the toxicity caused by nucleic acids (e.g., DNAs) can be reduced. In an embodiment, the nucleic acid molecule encodes a therapeutic protein, e.g., a protein described herein. In an embodiment, the nucleic acid molecule encodes an RNA molecule, e.g., an RNA molecule described herein. Delivery of RNA encoding a Cas9 molecule

[1198] RNA encoding Cas9 molecules (e.g., active Cas9 molecules, inactive Cas9 molecules or inactive Cas9 fusion proteins) and/or gRNA molecules, can be delivered into cells, e.g., target cells described herein, by art-known methods or as described herein. For example, Cas9-encoding and/or gRNA-encoding RNA can be delivered, e.g., by microinjection, electroporation, lipid-mediated transfection, peptide-mediated delivery, or a combination thereof.

### Delivery of Cas9 Molecule as Protein

[1199] Cas9 molecules (e.g., active Cas9 molecules, inactive Cas9 molecules or inactive Cas9 fusion proteins) can be delivered into cells by art-known methods or as described herein. For example, Cas9 protein molecules can be delivered, e.g., by microinjection, electroporation, lipid-mediated transfection, peptide-mediated delivery, cell squeezing or abrasion (e.g., by nanoneedles) or a combination thereof. Delivery can be accompanied by DNA encoding a gRNA or by a gRNA.

[1200] In an embodiment the Cas9 molecule, e.g., as described herein, is delivered as a protein and the gRNA molecule is delivered at one or more RNAs (e.g., as a dgRNA or sgRNA, as described herein). In embodiments, the Cas9 protein is complexed with the gRNA molecule prior to delivery to a cell, e.g., as described herein, as a ribonuclear protein complex (“RNP”). In embodiments, the RNP can be delivered into cells, e.g., described herein, by any art-known method, e.g., electroporation. As described herein, and without being bound by theory, it can be preferable to use a gRNA molecule and Cas9 molecule which result in high % editing at the target sequence (e.g., >85%, >90%, >95%, >98%, or >99%) in the target cell, e.g., described herein, even when the concentration of RNP delivered to the cell is reduced. Again, without being bound by theory, delivering a reduced or low concentration of RNP comprising a gRNA molecule that produces a high % editing at the target sequence in the target cell (including at the low RNP concentration), can be beneficial because it may reduce the frequency and number of off-target editing events. In one aspect, where a low or reduced concentration of RNP is to be used, the following procedure can be used to generate the RNP:
[1201] 1. Provide the Cas9 molecule and the tracr in solution at a high concentration (e.g., a concentration higher than the final RNP concentration to be delivered to the cell), and allow the two components to equilibrate;
[1202] 2. Provide the crRNA molecule, and allow the components to equilibrate (thereby forming a high-concentration solution of the RNP);
[1203] 3. Dilute the RNP solution to the desired concentration;
[1204] 4. Deliver said RNP at said desired concentration to the target cells, e.g., by electroporation.

[1205] The above procedure may be modified for use with sgRNA molecules by omitting step 2, above, and in step 1, providing the Cas9 molecule and the sgRNA molecule in solution at high concentration, and allowing the components to equilibrate. In embodiments, the Cas9 molecule and each gRNA component are provided in solution at a 1:2 ratio (Cas9:gRNA), e.g., a 1:2 molar ratio of Cas9:gRNA molecule. Where dgRNA molecules are used, the ratio, e.g., molar ratio, is 1:2:2 (Cas9:tracr:crRNA). In embodiments, the RNP is formed at a concentration of 20 uM or higher, e.g., a concentration from about 20 uM to about 50 uM. In embodiments, the RNP is formed at a concentration of 10 uM or higher, e.g., a concentration from about 10 uM to about 30 uM. In embodiments, the RNP is diluted to a final concentration of 10 uM or less (e.g., a concentration from about 0.01 uM to about 10 uM) in a solution comprising the target cell (e.g., described herein) for delivery to said target cell. In embodiments, the RNP is diluted to a final concentration of 3 uM or less (e.g., a concentration from about 0.01 uM to about 3 uM) in a solution comprising the target cell (e.g., described herein) for delivery to said target cell. In embodiments, the RNP is diluted to a final concentration of 1 uM or less (e.g., a concentration from about 0.01 uM to about 1 uM) in a solution comprising the target cell (e.g., described herein) for delivery to said target cell. In embodiments, the RNP is diluted to a final concentration of 0.3 uM or less (e.g., a concentration from about 0.01 uM to about 0.3 uM) in a solution comprising the target cell (e.g., described herein) for delivery to said target cell. In embodiments, the RNP is provided at a final concentration of about 3 uM in a solution comprising the target cell (e.g., described herein) for delivery to said target cell. In embodiments, the RNP is provided at a final concentration of about 1 uM in a solution comprising the target cell (e.g., described herein) for delivery to said target cell. In embodiments, the RNP is provided at a final concentration of about 0.3 uM in a solution comprising the target cell (e.g., described herein) for delivery to said target cell. In embodiments, the RNP is provided at a final concentration of about 0.1 uM in a solution comprising the target cell (e.g., described herein) for delivery to said target cell. In embodiments, the RNP is provided at a final concentration of about 0.05 uM in a solution comprising the target cell (e.g., described herein) for delivery to said target cell. In embodiments, the RNP is provided at a final concentration of about 0.03 uM in a solution comprising the target cell (e.g., described herein) for delivery to said target cell. In embodiments, the RNP is provided at a final concentration of about 0.01 uM in a solution comprising the target cell (e.g., described herein) for delivery to said target cell.

### Bi-Modal or Differential Delivery of Components

[1206] Separate delivery of the components of a Cas system, e.g., the Cas9 molecule component and the gRNA molecule component, and more particularly, delivery of the components by differing modes, can enhance performance, e.g., by improving tissue specificity and safety.

[1207] In an embodiment, the Cas9 molecule and the gRNA molecule are delivered by different modes, or as sometimes referred to herein as differential modes. Different or differential modes, as used herein, refer modes of delivery that confer different pharmacodynamic or pharmacokinetic properties on the subject component molecule, e.g., a Cas9 molecule, gRNA molecule, or template nucleic acid. For example, the modes of delivery can result in different tissue distribution, different half-life, or different temporal distribution, e.g., in a selected compartment, tissue, or organ.

[1208] Some modes of delivery, e.g., delivery by a nucleic acid vector that persists in a cell, or in progeny of a cell, e.g., by autonomous replication or insertion into cellular nucleic acid, result—in more persistent expression of and presence of a component.

### XI. Methods of Treatment

[1209] The Cas systems, e.g., one or more gRNA molecules and one or more Cas molecules (e.g., Cas9 molecules), described herein are useful for the treatment of disease in a mammal, e.g., in a human. The terms “treat,” “treated,” “treating,” and “treatment,” include the administration of cas systems, e.g., one or more gRNA molecules and one or more Cas9 molecules, to cells to prevent or delay the onset of the symptoms, complications, or biochemical indicia of a disease, alleviating the symptoms or arresting or inhibiting further development of the disease, condition, or disorder. Treatment may be prophylactic (to prevent or delay the onset of the disease, or to prevent the manifestation of clinical or subclinical symptoms thereof) or therapeutic suppression or alleviation of symptoms after the manifestation of the disease. Treatment can be measured by the therapeutic measures described herein. The methods of “treatment” of the present invention also include administration of cells altered by the introduction of a cas system (e.g., one or more gRNA molecules and one or more Cas molecules) into said cells to a subject in order to cure, reduce the severity of, or ameliorate one or more symptoms of a disease or condition, in order to prolong the health or survival of a subject beyond that expected in the absence of such treatment. For example, “treatment” includes the alleviation of a disease symptom in a subject by at least 5%, 6%, 7%, 8%, 9%, 10%, 110%, 12%, 130%, 14%, 150%, 16%, 17%, 18%, 19%, 20%, 250%, 30%, 35%, 40%, 45%, 50%, 55%, 60%, 65%, 70%, 75%, 80%, 85%, 90%, 95% or more.

### Methods of Treatment/Combination Therapies

[1210] In another aspect, the present invention provides a method comprising administering a cell of the invention, e.g., a cell which comprises or which at any time comprised a gRNA molecule as described herein, to a subject. In embodiments, the cell has been altered by the introduction of the gRNA molecule such that the gene comprising sequence complementary to the gRNA molecule targeting domain is altered, such that expression of functional product of that gene is reduced or eliminated relative to an unmodified cell. In embodiments, the cell is further engineered to express a CAR, e.g., as described herein. In embodiments, the cell is an immune effector cell, e.g., an NK cell or T cell. In embodiments, the cell is allogeneic. In embodiments, the cell is autologous.

[1211] In another aspect, the present invention provides a method comprising administering a gRNA molecule, e.g., a gRNA molecule described herein, or a cell comprising or which at any time comprised a gRNA molecule, e.g., a gRNA molecule described herein, to a subject in need thereof. In one embodiment, the subject has a disorder described herein, e.g., the subject has cancer, e.g., the subject has a cancer which expresses a target antigen described herein. In one embodiment, the subject is a human.

[1212] In another aspect, the invention pertains to a method of treating a subject having a disease associated with expression of a cancer associated antigen as described herein comprising administering to the subject an effective amount of a gRNA molecule, e.g., a gRNA molecule described herein, or a cell comprising or which at any time comprised a gRNA molecule, e.g., a gRNA molecule described herein.

[1213] In yet another aspect, the invention features a method of treating a subject having a disease associated with expression of a tumor antigen (e.g., an antigen described herein), comprising administering to the subject an effective amount of a cell, e.g., an immune effector cell (e.g., a population of immune effector cells) comprising or which at any time comprised a gRNA molecule, e.g., a gRNA molecule described herein, further comprising a CAR molecule, wherein the CAR molecule comprises an antigen binding domain, a transmembrane domain, and an intracellular domain, said intracellular domain comprises a costimulatory domain and/or a primary signaling domain, wherein said antigen binding domain binds to the tumor antigen associated with the disease, e.g. a tumor antigen as described herein.

[1214] In a related aspect, the invention features a method of treating a subject having a disease associated with expression of a tumor antigen. The method comprises administering to the subject an effective amount of a gRNA molecule, e.g., a gRNA molecule described herein, or a cell comprising or which at any time comprised a gRNA molecule, e.g., a gRNA molecule described herein, in combination with an agent that increases the efficacy of the cell, wherein:
[1215] the agent that increases the efficacy of the immune cell is chosen from one or more of:
[1216] a protein phosphatase inhibitor;
[1217] a kinase inhibitor;
[1218] a cytokine;
[1219] an inhibitor of an immune inhibitory molecule; or
[1220] an agent that decreases the level or activity of a T_{REG} cell.

[1221] In another aspect, the invention features a composition comprising an immune effector cell (e.g., a population of immune effector cells) comprising or which at any time comprised a gRNA molecule, e.g., a gRNA molecule described herein, for use in the treatment of a subject having a disease associated with expression of a tumor antigen, e.g., a disorder as described herein.

[1222] In certain embodiments of any of the aforesaid methods or uses, the cell comprising or which at any time comprised a gRNA described herein, has been altered such that the expression of the functional gene product of the gene comprising the target sequence complementary to the gRNA targeting domain has been reduced or abolished. In an embodiment, expression of the functional gene product of the gene comprising the target sequence complementary to the gRNA targeting domain has been abolished. In embodiments, the cell further expresses a CAR, e.g., as described herein. In embodiments the cell is allogeneic. In embodiments, the cell is autologous.

[1223] In certain embodiments of any of the aforesaid methods or uses, the disease associated with a tumor antigen, e.g., a tumor antigen described herein, is selected from a proliferative disease such as a cancer or malignancy or a precancerous condition such as a myelodysplasia, a myelodysplastic syndrome or a preleukemia, or is a non-cancer related indication associated with expression of a tumor antigen described herein. In one embodiment, the disease is a cancer described herein, e.g., a cancer described herein as being associated with a target described herein. In one embodiment, the disease is a hematologic cancer. In one embodiment, the hematologic cancer is leukemia. In one embodiment, the cancer is selected from the group consisting of one or more acute leukemias including but not limited to B-cell acute lymphoid leukemia (“BALL”), T-cell acute lymphoid leukemia (“TALL”), acute lymphoid leukemia (ALL); one or more chronic leukemias including but not limited to chronic myelogenous leukemia (CML), chronic lymphocytic leukemia (CLL); additional hematologic cancers or hematologic conditions including, but not limited to B cell prolymphocytic leukemia, blastic plasmacytoid dendritic cell neoplasm, Burkitt's lymphoma, diffuse large B cell lymphoma, follicular lymphoma, hairy cell leukemia, small cell- or a large cell-follicular lymphoma, malignant lymphoproliferative conditions, MALT lymphoma, mantle cell lymphoma, Marginal zone lymphoma, multiple myeloma, myelodysplasia and myelodysplastic syndrome, non-Hodgkin lymphoma, Hodgkin lymphoma, plasmablastic lymphoma, plasmacytoid dendritic cell neoplasm, Waldenstrom macroglobulinemia, and “preleukemia” which are a diverse collection of hematological conditions united by ineffective production (or dysplasia) of myeloid blood cells, and to disease associated with expression of a tumor antigen described herein include, but not limited to, atypical and/or non-classical cancers, malignancies, precancerous conditions or proliferative diseases expressing a tumor antigen as described herein; and any combination thereof. In another embodiment, the disease associated with a tumor antigen described herein is a solid tumor.

[1224] In certain embodiments, the methods or uses are carried out in combination with an agent that increases the efficacy of the immune effector cell, e.g., an agent as described herein.

[1225] In any of the aforesaid methods or uses, the disease associated with expression of the tumor antigen is selected from the group consisting of a proliferative disease, a precancerous condition, a cancer, and a non-cancer related indication associated with expression of the tumor antigen.

[1226] The cancer can be a hematologic cancer, e.g., a cancer chosen from one or more of chronic lymphocytic leukemia (CLL), acute leukemias, acute lymphoid leukemia (ALL), B-cell acute lymphoid leukemia (B-ALL), T-cell acute lymphoid leukemia (T-ALL), chronic myelogenous leukemia (CML), B cell prolymphocytic leukemia, blastic plasmacytoid dendritic cell neoplasm, Burkitt's lymphoma, diffuse large B cell lymphoma, follicular lymphoma, hairy cell leukemia, small cell- or a large cell-follicular lymphoma, malignant lymphoproliferative conditions, MALT lymphoma, mantle cell lymphoma, marginal zone lymphoma, multiple myeloma, myelodysplasia and myelodysplastic syndrome, non-Hodgkin's lymphoma, Hodgkin's lymphoma, plasmablastic lymphoma, plasmacytoid dendritic cell neoplasm, Waldenstrom macroglobulinemia, or pre-leukemia.

[1227] The cancer can also be chosen from colon cancer, rectal cancer, renal-cell carcinoma, liver cancer, non-small cell carcinoma of the lung, cancer of the small intestine, cancer of the esophagus, melanoma, bone cancer, pancreatic cancer, skin cancer, cancer of the head or neck, cutaneous or intraocular malignant melanoma, uterine cancer, ovarian cancer, rectal cancer, cancer of the anal region, stomach cancer, testicular cancer, uterine cancer, carcinoma of the fallopian tubes, carcinoma of the endometrium, carcinoma of the cervix, carcinoma of the vagina, carcinoma of the vulva, Hodgkin's Disease, non-Hodgkin's lymphoma, cancer of the endocrine system, cancer of the thyroid gland, cancer of the parathyroid gland, cancer of the adrenal gland, sarcoma of soft tissue, cancer of the urethra, cancer of the penis, solid tumors of childhood, cancer of the bladder, cancer of the kidney or ureter, carcinoma of the renal pelvis, neoplasm of the central nervous system (CNS), primary CNS lymphoma, tumor angiogenesis, spinal axis tumor, brain stem glioma, pituitary adenoma, Kaposi's sarcoma, epidermoid cancer, squamous cell cancer, T-cell lymphoma, environmentally induced cancers, combinations of said cancers, and metastatic lesions of said cancers.

[1228] In certain embodiments of the methods or uses described herein, the cell is administered in combination with an agent that increases the efficacy of the immune effector cell, e.g., one or more of a protein phosphatase inhibitor, a kinase inhibitor, a cytokine, an inhibitor of an immune inhibitory molecule; or an agent that decreases the level or activity of a T_{REG} cell.

[1229] In certain embodiments of the methods or uses described herein, the protein phosphatase inhibitor is a SHP-1 inhibitor and/or an SHP-2 inhibitor.

[1230] In other embodiments of the methods or uses described herein, kinase inhibitor is chosen from one or more of a CDK4 inhibitor, a CDK4/6 inhibitor (e.g., palbociclib), a BTK inhibitor (e.g., ibrutinib or RN-486), an mTOR inhibitor (e.g., rapamycin or everolimus (RAD001)), an MNK inhibitor, or a dual P13K/mTOR inhibitor. In one embodiment, the BTK inhibitor does not reduce or inhibit the kinase activity of interleukin-2-inducible kinase (ITK).

[1231] In other embodiments of the methods or uses described herein, the agent that decreases the level or activity of the T_{REG} cells is chosen from cyclophosphamide, anti-GITR antibody, CD25-depletion, or a combination thereof.

[1232] In other embodiments, the agent that inhibits the inhibitory molecule comprises a first polypeptide comprising an inhibitory molecule or a fragment thereof and a second polypeptide that provides a positive signal to the cell, and wherein the first and second polypeptides are expressed on the CAR-containing immune cells, wherein (i) the first polypeptide comprises PD1, PD-L1, CTLA-4, TIM-3, LAG3, VISTA, BTLA, TIGIT, LAIR1, CD160, 2B4, TGF beta, CEACAM-1, CEACAM-3, and CEACAM-5 or a fragment thereof; and/or (ii) the second polypeptide comprises an intracellular signaling domain comprising a primary signaling domain and/or a costimulatory signaling domain. In one embodiment, the primary signaling domain comprises a functional domain of CD3 zeta; and/or the costimulatory signaling domain comprises a functional domain of a protein selected from 41BB, CD27 and CD28.

[1233] In other embodiments, cytokine is chosen from IL-7; IL-15; a composition comprising a interleukin-15 (IL-15) polypeptide, a interleukin-15 receptor alpha (IL-15Ra) polypeptide, or a combination of both a IL-15 polypeptide and a IL-15Ra polypeptide e.g., hetIL-15; IL-18; IL-21, or a combination thereof. Exemplary hetIL-15 are heterodimeric non-covalent complexes of IL-15 and IL-15Ra (Admune Therapeutics, LLC). Such hetIL-15 is described in, e.g., U.S. Pat. No. 8,124,084, U.S. 2012/0177598, U.S. 2009/0082299, U.S. 2012/0141413, and U.S. 2011/0081311, incorporated herein by reference. hetIL-15 is described in, e.g., U.S. Pat. No. 8,124,084, U.S. 2012/0177598, U.S. 2009/0082299, U.S. 2012/0141413, and U.S. 2011/0081311, incorporated herein by reference. Other exemplary embodiments of hetIL-15 are covalent complexes between an IL-15 polypeptide and an IL-15R (e.g., IL-15Ra) polypeptide.

[1234] In other embodiments, the cell and a second, e.g., any of the combination therapies disclosed herein (e.g., the agent that that increases the efficacy of the cell) are administered substantially simultaneously or sequentially.

[1235] In other embodiments, the cell is administered in combination with a molecule that targets GITR and/or modulates GITR function. In certain embodiments, the molecule targeting GITR and/or modulating GITR function is administered prior to the CAR-expressing cell or population of cells, or prior to apheresis.

[1236] In one embodiment, lymphocyte infusion, for example allogeneic lymphocyte infusion, is used in the treatment of the cancer, wherein the lymphocyte infusion comprises at least one cell, e.g., CAR-expressing cell, of the present invention. In one embodiment, autologous lymphocyte infusion is used in the treatment of the cancer, wherein the autologous lymphocyte infusion comprises at least one cell, e.g., CAR-expressing cell described herein.

[1237] In one embodiment, the cell is a T cell and the T cell is diaglycerol kinase (DGK) deficient. In one embodiment, the cell is a T cell and the T cell is Ikaros deficient. In one embodiment, the cell is a T cell and the T cell is both DGK and Ikaros deficient.

[1238] In one embodiment, the method includes administering a cell of the invention, as described herein, in combination with an agent which enhances the activity of the cell, wherein the agent is a cytokine, e.g., IL-7; IL-15; a composition comprising a interleukin-15 (IL-15) polypeptide, a interleukin-15 receptor alpha (IL-15Ra) polypeptide, or a combination of both a IL-15 polypeptide and a IL-15Ra polypeptide e.g., hetIL-15; IL-18; IL-21; or a combination thereof. The cytokine can be delivered in combination with, e.g., simultaneously or shortly after, administration of the cell. Alternatively, the cytokine can be delivered after a prolonged period of time after administration of the cell, e.g., after assessment of the subject's response to the cell. In one embodiment the cytokine is administered to the subject simultaneously (e.g., administered on the same day) with or shortly after administration (e.g., administered 1 day, 2 days, 3 days, 4 days, 5 days, 6 days, or 7 days after administration) of the cell or population of cells of any of claims 61-80. In other embodiments, the cytokine is administered to the subject after a prolonged period of time (e.g., e.g., at least 2 weeks, 3 weeks, 4 weeks, 6 weeks, 8 weeks, 10 weeks, or more) after administration of the cell or population of cells of any of claims 61-80, or after assessment of the subject's response to the cell.

[1239] In other embodiments, the cells of the invention that are further engineered to express a CAR are administered in combination with an agent that ameliorates one or more side effects associated with administration of a cell expressing a CAR molecule. Side effects associated with the CAR-expressing cell can be chosen from cytokine release syndrome (CRS) or hemophagocytic lymphohistiocytosis (HLH).

[1240] In embodiments of any of the aforesaid methods or uses, the cells expressing the CAR molecule are administered in combination with an agent that treats the disease associated with expression of the tumor antigen, e.g., any of the second or third therapies disclosed herein. Additional exemplary combinations include one or more of the following.

[1241] In another embodiment, the cell, e.g., as described herein, can be administered in combination with another agent, e.g., a kinase inhibitor and/or checkpoint inhibitor described herein. In an embodiment, a cell of the invention can further express another agent, e.g., an agent which enhances the activity of the cell.

[1242] For example, in one embodiment, the agent that enhances the activity of the cell can be an agent which inhibits an inhibitory molecule.

[1243] In one embodiment, the agent that inhibits the inhibitory molecule is an inhibitory nucleic acid is a dsRNA, a siRNA, or a shRNA.

[1244] In another embodiment, the agent which inhibits an inhibitory molecule, e.g., is a molecule described herein, e.g., an agent that comprises a first polypeptide, e.g., an inhibitory molecule, associated with a second polypeptide that provides a positive signal to the cell, e.g., an intracellular signaling domain described herein. In one embodiment, the agent comprises a first polypeptide, e.g., of an inhibitory molecule, or a fragment thereof (e.g., at least a portion of the extracellular domain of any of these), and a second polypeptide which is an intracellular signaling domain described herein (e.g., comprising a costimulatory domain (e.g., 41BB, CD27 or CD28, e.g., as described herein) and/or a primary signaling domain (e.g., a CD3 zeta signaling domain described herein). In one embodiment, the agent comprises a first polypeptide of PD1 or a fragment thereof (e.g., at least a portion of the extracellular domain of PD1), and a second polypeptide of an intracellular signaling domain described herein (e.g., a CD28 signaling domain described herein and/or a CD3 zeta signaling domain described herein).

[1245] In one embodiment, the cell of the present invention, e.g., T cell or NK cell, is administered to a subject that has received a previous stem cell transplantation, e.g., autologous stem cell transplantation.

[1246] In one embodiment, the cell of the present invention, e.g., T cell or NK cells, is administered to a subject that has received a previous dose of melphalan.

[1247] In one embodiment, the cell of the invention, is administered in combination with an agent that increases the efficacy of the cell, e.g., an agent described herein.

[1248] In one embodiment, the cells of the invention, are administered in combination with a low, immune enhancing dose of an mTOR inhibitor. While not wishing to be bound by theory, it is believed that treatment with a low, immune enhancing, dose (e.g., a dose that is insufficient to completely suppress the immune system but sufficient to improve immune function) is accompanied by a decrease in PD-1 positive T cells or an increase in PD-1 negative cells. PD-1 positive T cells, but not PD-1 negative T cells, can be exhausted by engagement with cells which express a PD-1 ligand, e.g., PD-L1 or PD-L2. In an embodiment this approach can be used to optimize the performance of the cells described herein in the subject. While not wishing to be bound by theory, it is believed that, in an embodiment, the performance of endogenous, non-modified immune effector cells, e.g., T cells or NK cells, is improved. While not wishing to be bound by theory, it is believed that, in an embodiment, the performance of a CAR-expressing cell is improved. In other embodiments, cells, e.g., T cells or NK cells, which comprise or will be engineered to comprise a gRNA molecule of the invention, can be treated ex vivo by contact with an amount of an mTOR inhibitor that increases the number of PD1 negative immune effector cells, e.g., T cells or increases the ratio of PD1 negative immune effector cells, e.g., T cells/PD1 positive immune effector cells, e.g., T cells.

[1249] In an embodiment, administration of a low, immune enhancing, dose of an mTOR inhibitor, e.g., an allosteric inhibitor, e.g., RAD001, or a catalytic inhibitor, is initiated prior to administration of an CAR expressing cell described herein, e.g., T cells or NK cells. In an embodiment, the cells are administered after a sufficient time, or sufficient dosing, of an mTOR inhibitor, such that the level of PD1 negative immune effector cells, e.g., T cells or NK cells, or the ratio of PD1 negative immune effector cells, e.g., T cells/PD1 positive immune effector cells, e.g., T cells, has been, at least transiently, increased.

[1250] In an embodiment, the cell, e.g., T cell or NK cell, to be engineered to comprise a gRNA of the invention, is harvested after a sufficient time, or after sufficient dosing of the low, immune enhancing, dose of an mTOR inhibitor, such that the level of PD1 negative immune effector cells, e.g., T cells, or the ratio of PD1 negative immune effector cells, e.g., T cells/PD1 positive immune effector cells, e.g., T cells, in the subject or harvested from the subject has been, at least transiently, increased.

[1251] In one embodiment, the cell of the invention, is administered in combination with an agent that ameliorates one or more side effect associated with administration of a cell, e.g., an agent described herein.

[1252] In one embodiment, the cell is administered in combination with an agent that treats the disease associated with a cancer associated antigen as described herein, e.g., an agent described herein.

[1253] In one embodiment, the cell is administered at a dose and/or dosing schedule described herein.

[1254] In one embodiment, the subject (e.g., human) receives an initial administration of cells of the invention, and one or more subsequent administrations of cells of the invention, wherein the one or more subsequent administrations are administered less than 15 days, e.g., 14, 13, 12, 11, 10, 9, 8, 7, 6, 5, 4, 3, or 2 days after the previous administration. In one embodiment, more than one administration of cells of the invention are administered to the subject (e.g., human) per week, e.g., 2, 3, or 4 administrations of cells comprising a CAR molecule are administered per week. In one embodiment, the subject (e.g., human subject) receives more than one administration of cells of the invention per week (e.g., 2, 3 or 4 administrations per week) (also referred to herein as a cycle), followed by a week of no administration of cells of the invention, and then one or more additional administration of cells of the invention (e.g., more than one administration of the cells of the invention per week) is administered to the subject. In another embodiment, the subject (e.g., human subject) receives more than one cycle of cells of the invention, and the time between each cycle is less than 10, 9, 8, 7, 6, 5, 4, or 3 days. In one embodiment, the cells of the invention are administered every other day for 3 administrations per week. In one embodiment, the cells of the invention are administered for at least two, three, four, five, six, seven, eight or more weeks.

[1255] In one embodiment, the cells of the invention, are administered as a first line treatment for the disease, e.g., the cancer, e.g., the cancer described herein. In another embodiment, the cells of the invention, are administered as a second, third, fourth line treatment for the disease, e.g., the cancer, e.g., the cancer described herein.

[1256] In one embodiment, a population of cells described herein is administered.

[1257] In another aspect, the invention pertains to the isolated nucleic acid molecule encoding a gRNA of the invention, the gRNA molecule of the invention, and the cell comprising or which at any time comprised a gRNA of the invention for use as a medicament. In embodiments, the cell comprising or which at any time comprised a gRNA of the invention is or will be altered such that expression of the functional product of the gene comprising sequence complimentary to the gRNA targeting domain is reduced or abolished.

[1258] In another aspect, the invention pertains to the isolated nucleic acid molecule encoding a gRNA of the invention, the gRNA molecule of the invention, and the cell comprising or which at any time comprised a gRNA of the invention for use in the treatment of a disease expressing a cancer associated antigen as described herein. In embodiments, the cell comprising or which at any time comprised a gRNA of the invention is or will be altered such that expression of the functional product of the gene comprising sequence complimentary to the gRNA targeting domain is reduced or abolished.

[1259] In another aspect, the invention pertains to the isolated nucleic acid molecule encoding a gRNA of the invention, the gRNA molecule of the invention, and the cell comprising or which at any time comprised a gRNA of the invention for use as a medicament in combination with a cytokine, e.g., IL-7; IL-15; a composition comprising a interleukin-15 (IL-15) polypeptide, a interleukin-15 receptor alpha (IL-15Ra) polypeptide, or a combination of both a IL-15 polypeptide and a IL-15Ra polypeptide e.g., hetIL-15; IL-18; and/or IL-21; and/or combinations thereof as described herein. In another aspect, the invention pertains to a cytokine described herein for use as a medicament in combination with a cell described herein. In embodiments, the cell comprising or which at any time comprised a gRNA of the invention is or will be altered such that expression of the functional product of the gene comprising sequence complimentary to the gRNA targeting domain is reduced or abolished.

[1260] In another aspect, the invention pertains to the isolated nucleic acid molecule encoding a gRNA of the invention, the gRNA molecule of the invention, and the cell comprising or which at any time comprised a gRNA of the invention for use as a medicament in combination with a kinase inhibitor and/or a checkpoint inhibitor as described herein. In another aspect, the invention pertains to a kinase inhibitor and/or a checkpoint inhibitor described herein for use as a medicament in combination with a cell comprising or which at any time comprised a gRNA of the invention.

[1261] In another aspect, the invention features a composition comprising a cell of the invention for use in the treatment of a subject having a disease associated with expression of a tumor-supporting antigen, e.g., a disorder as described herein.

[1262] In any of the aforesaid methods or uses, the disease associated with expression of the tumor-supporting antigen is selected from the group consisting of a proliferative disease, a precancerous condition, a cancer, and a non-cancer related indication associated with expression of the tumor-supporting antigen. In an embodiment, the disease associated with a tumor-supporting antigen described herein is a solid tumor.

[1263] In one embodiment of the methods or uses described herein, the cell of the invention is administered in combination with another agent. In one embodiment, the agent can be a kinase inhibitor, e.g., a CDK4/6 inhibitor, a BTK inhibitor, an mTOR inhibitor, a MNK inhibitor, or a dual PI3K/mTOR inhibitor, and combinations thereof. In one embodiment, the kinase inhibitor is a CDK4 inhibitor, e.g., a CDK4 inhibitor described herein, e.g., a CD4/6 inhibitor, such as, e.g., 6-Acetyl-8-cyclopentyl-5-methyl-2-(5-piperazin-1-yl-pyridin-2-ylamino)-8H-pyrido[2,3-d]pyrimidin-7-one, hydrochloride (also referred to as palbociclib or PD0332991). In one embodiment, the kinase inhibitor is a BTK inhibitor, e.g., a BTK inhibitor described herein, such as, e.g., ibrutinib. In one embodiment, the kinase inhibitor is an mTOR inhibitor, e.g., an mTOR inhibitor described herein, such as, e.g., rapamycin, a rapamycin analog, OSI-027. The mTOR inhibitor can be, e.g., an mTORC1 inhibitor and/or an mTORC2 inhibitor, e.g., an mTORC1 inhibitor and/or mTORC2 inhibitor described herein. In one embodiment, the kinase inhibitor is a MNK inhibitor, e.g., a MNK inhibitor described herein, such as, e.g., 4-amino-5-(4-fluoroanilino)-pyrazolo[3,4-d]pyrimidine. The MNK inhibitor can be, e.g., a MNK1a, MNK1b, MNK2a and/or MNK2b inhibitor. The dual PI3K/mTOR inhibitor can be, e.g., PF-04695102.

[1264] In one embodiment of the methods or uses described herein, the kinase inhibitor is a CDK4 inhibitor selected from aloisine A; flavopiridol or HMR-1275, 2-(2-chlorophenyl)-5,7-dihydroxy-8-[(3S,4R)-3-hydroxy-1-methyl-4-piperidinyl]-4-chromenone; crizotinib (PF-02341066; 2-(2-Chlorophenyl)-5,7-dihydroxy-8-[(2R,3S)-2-(hydroxymethyl)-1-methyl-3-pyrrolidinyl]-4H-1-benzopyran-4-one, hydrochloride (P276-00); 1-methyl-5-[[2-[5-(trifluoromethyl)-1H-imidazol-2-yl]-4-pyridinyl]oxy]-N-[4-(trifluoromethyl)phenyl]-1H-benzimidazol-2-amine (RAF265); indisulam (E7070); roscovitine (CYC202); palbociclib (PD0332991); dinaciclib (SCH727965); N-[5-[[(5-tert-butyloxazol-2-yl)methyl]thio]thiazol-2-yl]piperidine-4-carboxamide (BMS 387032); 4-[[9-chloro-7-(2,6-difluorophenyl)-5H-pyrimido[5,4-d][2]benzazepin-2-yl]amino]-benzoic acid (MLN8054); 5-[3-(4,6-difluoro-1H-benzimidazol-2-yl)-1H-indazol-5-yl]-N-ethyl-4-methyl-3-pyridinemethanamine (AG-024322); 4-(2,6-dichlorobenzoylamino)-1H-pyrazole-3-carboxylic acid N-(piperidin-4-yl)amide (AT7519); 4-[2-methyl-1-(1-methylethyl)-1H-imidazol-5-yl]-N-[4-(methylsulfonyl)phenyl]-2-pyrimidinamine (AZD5438); and XL281 (BMS908662).

[1265] In one embodiment of the methods or uses described herein, the kinase inhibitor is a CDK4 inhibitor, e.g., palbociclib (PD0332991), and the palbociclib is administered at a dose of about 50 mg, 60 mg, 70 mg, 75 mg, 80 mg, 90 mg, 100 mg, 105 mg, 110 mg, 115 mg, 120 mg, 125 mg, 130 mg, 135 mg (e.g., 75 mg, 100 mg or 125 mg) daily for a period of time, e.g., daily for 14-21 days of a 28 day cycle, or daily for 7-12 days of a 21 day cycle. In one embodiment, 1, 2, 3, 4, 5, 6, 7, 8, 9, 10, 11, 12 or more cycles of palbociclib are administered.

[1266] In one embodiment of the methods or uses described herein, the kinase inhibitor is a BTK inhibitor selected from ibrutinib (PCI-32765); GDC-0834; RN-486; CGI-560; CGI-1764; HM-71224; CC-292; ONO-4059; CNX-774; and LFM-A13. In one embodiment, the BTK inhibitor does not reduce or inhibit the kinase activity of interleukin-2-inducible kinase (ITK), and is selected from GDC-0834; RN-486; CGI-560; CGI-1764; HM-71224; CC-292; ONO-4059; CNX-774; and LFM-A13.

[1267] In one embodiment of the methods or uses described herein, the kinase inhibitor is a BTK inhibitor, e.g., ibrutinib (PCI-32765), and the ibrutinib is administered at a dose of about 250 mg, 300 mg, 350 mg, 400 mg, 420 mg, 440 mg, 460 mg, 480 mg, 500 mg, 520 mg, 540 mg, 560 mg, 580 mg, 600 mg (e.g., 250 mg, 420 mg or 560 mg) daily for a period of time, e.g., daily for 21 day cycle, or daily for 28 day cycle. In one embodiment, 1, 2, 3, 4, 5, 6, 7, 8, 9, 10, 11, 12 or more cycles of ibrutinib are administered.

[1268] In one embodiment of the methods or uses described herein, the kinase inhibitor is a BTK inhibitor that does not inhibit the kinase activity of ITK, e.g., RN-486, and RN-486 is administered at a dose of about 100 mg, 110 mg, 120 mg, 130 mg, 140 mg, 150 mg, 160 mg, 170 mg, 180 mg, 190 mg, 200 mg, 210 mg, 220 mg, 230 mg, 240 mg, 250 mg (e.g., 150 mg, 200 mg or 250 mg) daily for a period of time, e.g., daily a 28 day cycle. In one embodiment, 1, 2, 3, 4, 5, 6, 7, or more cycles of RN-486 are administered.

[1269] In one embodiment of the methods or uses described herein, the kinase inhibitor is an mTOR inhibitor selected from temsirolimus; ridaforolimus (1R,2R,4S)-4-[(2R)-2 [(1R,9S,12S,15R,16 E,18R,19R,21R, 23S,24 E,26 E,28Z,30S,32S,35R)-1,18-dihydroxy-19,30-dimethoxy-15,17,21,23,29,35-hexamethyl-2,3,10,14,20-pentaoxo-11,36-dioxa-4-azatricyclo[30.3.1.0^{4,9}]hexatriaconta-16,24,26,28-tetraen-12-yl]propyl]-2-methoxycyclohexyl dimethylphosphinate, also known as AP23573 and MK8669; everolimus (RAD001); rapamycin (AY22989); simapimod; (5-{2,4-bis[(3S)-3-methylmorpholin-4-yl]pyrido[2,3-d]pyrimidin-7-yl}-2-methoxyphenyl)methanol (AZD8055); 2-amino-8-[trans-4-(2-hydroxyethoxy)cyclohexyl]-6-(6-methoxy-3-pyridinyl)-4-methyl-pyrido[2,3-d]pyrimidin-7(8H)-one (PF04691502); and N²-[1,4-dioxo-4-[[4-(4-oxo-8-phenyl-4H-1-benzopyran-2-yl)morpholinium-4-yl]methoxy]butyl]-L-arginylglycyl-L-α-aspartylL-serine—(SEQ ID NO: 6659), inner salt (SF1126); and XL765.

[1270] In one embodiment of the methods or uses described herein, the kinase inhibitor is an mTOR inhibitor, e.g., rapamycin, and the rapamycin is administered at a dose of about 3 mg, 4 mg, 5 mg, 6 mg, 7 mg, 8 mg, 9 mg, 10 mg (e.g., 6 mg) daily for a period of time, e.g., daily for 21 day cycle, or daily for 28 day cycle. In one embodiment, 1, 2, 3, 4, 5, 6, 7, 8, 9, 10, 11, 12 or more cycles of rapamycin are administered. In one embodiment, the kinase inhibitor is an mTOR inhibitor, e.g., everolimus and the everolimus is administered at a dose of about 2 mg, 2.5 mg, 3 mg, 4 mg, 5 mg, 6 mg, 7 mg, 8 mg, 9 mg, 10 mg, 11 mg, 12 mg, 13 mg, 14 mg, 15 mg (e.g., 10 mg) daily for a period of time, e.g., daily for 28 day cycle. In one embodiment, 1, 2, 3, 4, 5, 6, 7, 8, 9, 10, 11, 12 or more cycles of everolimus are administered.

[1271] In one embodiment of the methods or uses described herein, the kinase inhibitor is an MNK inhibitor selected from CGP052088; 4-amino-3-(p-fluorophenylamino)-pyrazolo[3,4-d]pyrimidine (CGP57380); cercosporamide; ETC-1780445-2; and 4-amino-5-(4-fluoroanilino)-pyrazolo[3,4-d]pyrimidine.

[1272] In one embodiment of the methods or uses described herein, the kinase inhibitor is a dual phosphatidylinositol 3-kinase (PI3K) and mTOR inhibitor selected from 2-Amino-8-[trans-4-(2-hydroxyethoxy)cyclohexyl]-6-(6-methoxy-3-pyridinyl)-4-methyl-pyrido[2,3-d]pyrimidin-7(8H)-one (PF-04691502); N-[4-[[4-(Dimethylamino)-1-piperidinyl]carbonyl]phenyl]-N-[4-(4,6-di-4-morpholinyl-1,3,5-triazin-2-yl)phenyl]urea (PF-05212384, PKI-587); 2-Methyl-2-{4-[3-methyl-2-oxo-8-(quinolin-3-yl)-2,3-dihydro-1H-imidazo[4,5-c]quinolin-1-yl]phenyl}propanenitrile (BEZ-235); apitolisib (GDC-0980, RG7422); 2,4-Difluoro-N-{2-(methyloxy)-5-[4-(4-pyridazinyl)-6-quinolinyl]-3-pyridinyl}benzenesulfonamide (GSK2126458); 8-(6-methoxypyridin-3-yl)-3-methyl-1-(4-(piperazin-1-yl)-3-(trifluoromethyl)phenyl)-1H-imidazo[4,5-c]quinolin-2(3H)-one Maleic acid (NVP-BGT226); 3-[4-(4-Morpholinylpyrido[3′,2′:4,5]furo[3,2-d]pyrimidin-2-yl]phenol (PI-103); 5-(9-isopropyl-8-methyl-2-morpholino-9H-purin-6-yl)pyrimidin-2-amine (VS-5584, SB2343); and N-[2-[(3,5-Dimethoxyphenyl)amino]quinoxalin-3-yl]-4-[(4-methyl-3-methoxyphenyl)carbonyl]aminophenylsulfonamide (XL765).

[1273] In one embodiment of the methods or uses described herein, a CAR expressing immune effector cell described herein is administered to a subject in combination with a protein tyrosine phosphatase inhibitor, e.g., a protein tyrosine phosphatase inhibitor described herein. In one embodiment, the protein tyrosine phosphatase inhibitor is an SHP-1 inhibitor, e.g., an SHP-1 inhibitor described herein, such as, e.g., sodium stibogluconate. In one embodiment, the protein tyrosine phosphatase inhibitor is an SHP-2 inhibitor.

[1274] In one embodiment of the methods or uses described herein, the cell of the invention is administered in combination with another agent, and the agent is a cytokine. The cytokine can be, e.g., IL-7; IL-15; a composition comprising a interleukin-15 (IL-15) polypeptide, a interleukin-15 receptor alpha (IL-15Ra) polypeptide, or a combination of both a IL-15 polypeptide and a IL-15Ra polypeptide e.g., hetIL-15; IL-18; IL-21; or a combination thereof. In another embodiment, the cell of the invention is administered in combination with a checkpoint inhibitor, e.g., a checkpoint inhibitor described herein. For example, in one embodiment, the check point inhibitor inhibits an inhibitory molecule selected from PD-1, PD-L1, CTLA-4, TIM-3, CEACAM (e.g., CEACAM-1, CEACAM-3 and/or CEACAM-5), LAG-3, VISTA, BTLA, TIGIT, LAIR1, CD160, 2B4 and TGF beta.

[1275] In one aspect, the invention provides a method of treating a subject, e.g., a subject having a condition described herein, with an allogeneic cell, for example an allogeneic immune effector cell, for example an allogeneic CAR-expressing T cell, comprising or which at any time comprised a gRNA molecule of the invention. In embodiments, the cell has been altered such that expression of the functional gene product of a gene comprising a target sequence complementary to the gRNA targeting domain has been reduced or eliminated.

[1276] In one aspect, the invention provides a method of treatment comprising:
[1277] (a) providing a population of cells from an allogeneic donor;
[1278] (b) introducing into the cells a CRISPR System (e.g., an S. pyogenes Cas9 CRISPR system) comprising a first gRNA molecule of the invention (or nucleic acid encoding said gRNA molecule);
[1279] (c) optionally, selecting those cells in which expression of the gene product (e.g., functional gene product) of the gene comprising the target sequence complementary to the targeting domain of the first gRNA has been reduced or eliminated;
[1280] (d) transducing the cells with nucleic acid encoding a CAR as described herein; and
[1281] (e) administering the cells to a patient in need thereof, e.g., a patient who has a disease associated with expression of an antigen recognized by the CAR.

[1282] In embodiments, the first gRNA molecule comprises a targeting domain complementary to an allogeneic T cell target, e.g., a component of the TCR, for example, a first gRNA molecule comprising a targeting domain complementary to a target sequence in a gene selected from CD247, CD3D, CD3 E, CD3G, TRAC, TRBC1, and TRBC2. In embodiments, the first gRNA to CD247, CD3D, CD3 E, CD3G, TRAC, TRBC1, or TRBC2 is a first gRNA comprising a targeting domain listed in Table 1, Table 4 or Table 5. In embodiments, step (c) comprises selected those cells which are negative for TCR expression. In embodiments, the method further comprises administering to the patient an agent which selectively inhibits or depletes NK cells, for example and antibody or antigen binding fragment to an antigen specific to NK cells, e.g., which is not expressed on T cells.

[1283] In embodiments, the method further comprises introducing into the cells a second gRNA molecule of the invention (or nucleic acid encoding said gRNA molecule), e.g., introducing into the cells a CRISPR System (e.g., an S. pyogenes Cas9 CRISPR system) comprising a second gRNA molecule of the invention (or nucleic acid encoding said gRNA molecule). In embodiments, the second gRNA molecule comprises a targeting domain complementary to an allogeneic T cell target, e.g., a second gRNA molecule comprising a targeting domain complementary to a target sequence in a gene selected from B2M, HLA-A, HLA-B and HLA-C. In embodiments, the second gRNA to B2M, HLA-A, HLA-B or HLA-C is a second gRNA comprising a targeting domain of Table 1, or Table 3. In embodiments, step (c) optionally includes, selecting those cells in which expression of the gene product (e.g., functional gene product) of the gene comprising the target sequence complementary to the targeting domain of the first gRNA and in which expression of the gene product (e.g., functional gene product) of the gene comprising the target sequence complementary to the targeting domain of the second gRNA has been reduced or eliminated. In embodiments, step (c) comprises selected those cells which are negative for TCR expression and/or negative for B2M or HLA expression. In embodiments, the method further comprises administering to the patient an agent which selectively inhibits or depletes NK cells, for example and antibody or antigen binding fragment to an antigen specific to NK cells, e.g., which is not expressed on T cells.

[1284] In embodiments, the method further comprises introducing into the cells a third gRNA molecule of the invention (or nucleic acid encoding said gRNA molecule), e.g., introducing into the cells a CRISPR System (e.g., an S. pyogenes Cas9 CRISPR system) comprising a second gRNA molecule of the invention (or nucleic acid encoding said gRNA molecule). In embodiments, the third gRNA molecule comprises a targeting domain complementary to a target sequence in a gene of an inhibitory molecule or downstream effector of signaling through an inhibitory molecule, e.g., a third gRNA molecule comprising a targeting domain complementary to a target sequence in a gene selected from CD274, HAVCR2, LAG3, PDCD1, PD-L2, CTLA4, CEACAM (e.g., CEACAM-1, CEACAM-3 and/or CEACAM-5), VISTA, BTLA, TIGIT, LAIR1, CD160, 2B4, CD80, CD86, B7-H3 (CD113), B7-H4 (VTCN1), HVEM (TNFRSF14 or CD107), KIR, A2aR, MHC class I, MHC class II, GAL9, adenosine, and TGF beta, and PTPN11. In embodiments, the third gRNA comprises a targeting domain to CD274, HAVCR2, LAG3, PDCD1 or PTPN11 selected from the targeting domains of Table 2, or Table 6. In embodiments, step (c) optionally includes, selecting those cells in which expression of the gene product (e.g., functional gene product) of the gene comprising the target sequence complementary to the targeting domain of the first gRNA, in which expression of the gene product (e.g., functional gene product) of the gene comprising the target sequence complementary to the targeting domain of the second gRNA, and/or in which expression of the gene product (e.g., functional gene product) of the gene comprising the target sequence complementary to the targeting domain of the third gRNA has been reduced or eliminated. In embodiments, step (c) comprises selecting those cells which are negative for TCR expression, negative for B2M or HLA expression, and/or negative for expression of a targeted inhibitory molecule or downstream effector of signaling through an inhibitory molecule. In embodiments, the method further comprises administering to the patient an agent which selectively inhibits or depletes NK cells, for example and antibody or antigen binding fragment to an antigen specific to NK cells, e.g., which is not expressed on T cells. In other embodiments, the third gRNA comprises a targeting domain complementary to a target sequence in a gene selected from CIITA, RFXANK, RFX5, RFXAP, e.g., as described herein. In embodiments, the third gRNA comprises a targeting domain complementary to a target sequence in a CIITA gene, e.g., as described herein, e.g., in Table 6c.

[1285] In any of the aforementioned aspects and embodiments the CAR is a CAR as described herein. In any of the aforementioned aspects and embodiments, the CAR is a BCMA CAR, e.g., a BCMA CAR described herein, e.g., comprises or is engineered to express a CAR comprising SEQ ID NO:8559. In aspects, the nucleic acid encoding the CAR is introduced into the cell by viral vector, e.g., lentiviral vector, transduction. In other aspects, the nucleic acid encoding the CAR is introduced as DNA that is incorporated in the host cell genome at or near a site modified by one of the CRISPR systems introduced into said cells.

[1286] In one aspect, the invention provides a method of treatment comprising:
[1287] (a) providing a population of cells, e.g, immune effector cells, e.g., T cell or NK cells, e.g., as described herein, (e.g., a population of said cells from an allogeneic donor);
[1288] (b) introducing into the population of cells a CRISPR System (e.g., an S. pyogenes Cas9 CRISPR system) comprising a first gRNA molecule of the invention (or nucleic acid encoding said gRNA molecule) comprising a targeting domain complementary to a target sequence in CD247, CD3D, CD3 E, CD3G, TRAC, TRBC1, TRBC2, e.g., a target sequence in TRAC, TRBC1 or TRBC2, e.g., a target sequence in TRAC, e.g., as described herein;
[1289] (c) introducing into the population of cells a CRISPR System (e.g., an S. pyogenes Cas9 CRISPR system) comprising a second gRNA molecule of the invention (or nucleic acid encoding said gRNA molecule) comprising a targeting domain complementary to a target sequence in B2M, e.g., as described herein;
[1290] (d) optionally, selecting those cells in which expression of functional TCR has been reduced or eliminated;
[1291] (e) transducing the population of cells with nucleic acid encoding a CAR, e.g., as described herein, e.g., a BCMA CAR as described herein; and
[1292] (f) administering the population of cells to a patient in need thereof, e.g., a patient who has a disease associated with expression of an antigen recognized by the CAR.

[1293] In one embodiment, the method further comprises the step of (g) introducing into said population of cells into the population of cells a CRISPR System (e.g., an S. pyogenes Cas9 CRISPR system) comprising a third gRNA molecule of the invention (or nucleic acid encoding said gRNA molecule) comprising a targeting domain complementary to a target sequence in CIITA, RFXANK, RFX5 or RFXAP, e.g., complementary to a target sequence in CIITA, e.g., as described herein.

[1294] In one aspect, the invention provides a method of treatment comprising:
[1295] (a) providing a population of cells, e.g, immune effector cells, e.g., T cell or NK cells, e.g., as described herein, (e.g., a population of said cells from an allogeneic donor);
[1296] (b) introducing into the population of cells a CRISPR System (e.g., an S. pyogenes Cas9 CRISPR system) comprising a first gRNA molecule of the invention (or nucleic acid encoding said gRNA molecule) comprising a targeting domain complementary to a target sequence in CD247, CD3D, CD3 E, CD3G, TRAC, TRBC1, TRBC2, e.g., a target sequence in TRAC, TRBC1 or TRBC2, e.g., a target sequence in TRAC, e.g., as described herein;
[1297] (c) introducing into the population of cells a CRISPR System (e.g., an S. pyogenes Cas9 CRISPR system) comprising a second gRNA molecule of the invention (or nucleic acid encoding said gRNA molecule) comprising a targeting domain complementary to a target sequence in NLRC5, e.g., as described herein;
[1298] (d) optionally, selecting those cells in which expression of functional TCR has been reduced or eliminated;
[1299] (e) transducing the population of cells with nucleic acid encoding a CAR, e.g., as described herein, e.g., a BCMA CAR as described herein; and
[1300] (f) administering the population of cells to a patient in need thereof, e.g., a patient who has a disease associated with expression of an antigen recognized by the CAR.

[1301] In one embodiment, the method further comprises the step of (g) introducing into said population of cells into the population of cells a CRISPR System (e.g., an S. pyogenes Cas9 CRISPR system) comprising a third gRNA molecule of the invention (or nucleic acid encoding said gRNA molecule) comprising a targeting domain complementary to a target sequence in CIITA, RFXANK, RFX5 or RFXAP, e.g., complementary to a target sequence in CIITA, e.g., as described herein.

[1302] In one aspect, the invention provides a method of treatment comprising:
[1303] (a) providing a population of cells, for example immune effector cells (e.g., NK or T cells), from an allogeneic or autologous donor;
[1304] (b) introducing into the cells a CRISPR System (e.g., an S. pyogenes Cas9 CRISPR system) comprising a first gRNA molecule of the invention (or nucleic acid encoding said gRNA molecule);
[1305] (c) optionally, selecting those cells in which expression of the gene product (e.g., functional gene product) of the gene comprising the target sequence complementary to the targeting domain of the first gRNA has been reduced or eliminated;
[1306] (d) transducing the cells with nucleic acid encoding a CAR as described herein; and
[1307] (e) administering the cells to a patient in need thereof, e.g., a patient who has a disease associated with expression of an antigen recognized by the CAR.

[1308] In embodiments, the first gRNA molecule comprises a targeting domain complementary to a target sequence in a gene of an inhibitory molecule or downstream effector of signaling through an inhibitory molecule, e.g., a first gRNA molecule comprising a targeting domain complementary to a target sequence in a gene selected from CD274, HAVCR2, LAG3, PDCD1, PD-L2, CTLA4, CEACAM (e.g., CEACAM-1, CEACAM-3 and/or CEACAM-5), VISTA, BTLA, TIGIT, LAIR1, CD160, 2B4, CD80, CD86, B7-H3 (CD113), B7-H4 (VTCN1), HVEM (TNFRSF14 or CD107), KIR, A2aR, MHC class I, MHC class II, GAL9, adenosine, and TGF beta, and PTPN11. In embodiments, the first gRNA comprises a targeting domain to CD274, HAVCR2, LAG3, PDCD1 or PTPN11 selected from the targeting domains of Table 2 or Table 6. In embodiments, step (c) optionally includes selecting those cells in which expression of the gene product (e.g., functional gene product) of the gene comprising the target sequence complementary to the targeting domain of the first gRNA has been reduced or eliminated.

[1309] In embodiments, the method further comprises introducing into the cells at least a second gRNA molecule (e.g., 2 or more gRNA molecules) of the invention (or nucleic acid encoding said gRNA molecule(s)). In embodiments, each additional gRNA molecule(s), e.g., the second gRNA molecule, comprises a targeting domain complementary to a target sequence in a gene of an inhibitory molecule or downstream effector of signaling through an inhibitory molecule, e.g., to a target sequence in a gene selected from CD274, HAVCR2, LAG3, PDCD1, PD-L2, CTLA4, CEACAM (e.g., CEACAM-1, CEACAM-3 and/or CEACAM-5), VISTA, BTLA, TIGIT, LAIR1, CD160, 2B4, CD80, CD86, B7-H3 (CD113), B7-H4 (VTCN1), HVEM (TNFRSF14 or CD107), KIR, A2aR, MHC class I, MHC class II, GAL9, adenosine, and TGF beta, and PTPN11. In embodiments, the third gRNA comprises a targeting domain to CD274, HAVCR2, LAG3, PDCD1 or PTPN11 selected from the targeting domains of Table 2 or Table 6. In embodiments, each additional gRNA molecule comprises a targeting domain complementary to a sequence in the gene of a different inhibitory molecule or downstream effector of signaling through an inhibitory molecule In embodiments, step (c) optionally includes, selecting those cells in which expression of the gene product (e.g., functional gene product) of the gene comprising the target sequence complementary to the targeting domain of the first gRNA, in which expression of the gene product (e.g., functional gene product) of the gene comprising the target sequence complementary to the targeting domain of the second gRNA, and/or in which expression of the gene product (e.g., functional gene product) of the gene comprising the target sequence complementary to the targeting domain of the third or more gRNA (if present) has been reduced or eliminated.

[1310] In one aspect, the invention provides a method of treating a subject, e.g., a subject having a condition described herein, with an allogeneic cell, for example an allogeneic immune effector cell, for example an allogeneic CAR-expressing T cell, comprising or which at any time comprised a gRNA molecule targeting a component of the TCR and a gRNA molecule targeting a target of an immunosuppressant. In embodiments, the cell has been altered such that expression of a functional TCR and expression of a functional target of an immunosuppressant has been reduced or eliminated.

[1311] In one aspect, the invention provides a method of treatment comprising:
[1312] (a) providing a population of cells from an allogeneic donor;
[1313] (b) introducing into the cells a CRISPR System (e.g., an S. pyogenes Cas9 CRISPR system) comprising a first gRNA molecule of the invention (or nucleic acid encoding said gRNA molecule) comprising a targeting domain complementary to a target sequence in CD247, CD3D, CD3 E, CD3G, TRAC, TRBC1, TRBC2;
[1314] (c) introducing into the cells a CRISPR System (e.g., an S. pyogenes Cas9 CRISPR system) comprising a second gRNA molecule of the invention (or nucleic acid encoding said gRNA molecule) comprising a targeting domain complementary to a target sequence in DCK, CD52, FKBP1A or NR3C1;
[1315] (d) optionally, selecting those cells in which expression of functional TCR, expression of functional target of an immunosuppressant, or expression of functional TCR and functional target of an immunosuppressant has been reduced or eliminated;
[1316] (e) transducing the cells with nucleic acid encoding a CAR as described herein; and
[1317] (f) administering the cells to a patient in need thereof, e.g., a patient who has a disease associated with expression of an antigen recognized by the CAR; and
[1318] (g) administering to the patient an immunosuppressant that binds to the target of an immunosuppressant targeted by the gRNA of (c).

[1319] In embodiments, the first gRNA to CD247, CD3D, CD3 E, CD3G, TRAC, TRBC1, or TRBC2 is a first gRNA comprising a targeting domain listed in Table 1, Table 4 or Table 5. In embodiments, the second gRNA to DCK, CD52, FKBP1A or NR3C1 is a second gRNA molecule comprising a targeting domain listed in Table 1. In embodiments, the first gRNA targets TRAC, TRBC1 or TRBC2. In embodiments, the second gRNA targets DCK, and the immunosuppressant of (g) is a nucleoside analog-based drug such as cytarabine (cytosine arabinoside) or gemcitabine. In an embodiment, the second gRNA targets NR3C1 (the gene encoding for glucocorticoid receptor (GR)), and the immunosuppressant is a corticosteroid such as dexamethasone. In an embodiment, the second gRNA targets CD52, and the immunosuppressant is an anti-CD52 antibody or antigen-binding fragment thereof such as alemtuzumab (CAMPATH®). In an embodiment, the second gRNA targets FKBP1A, and the immunosuppressant is FK506 (or FKBP12-binding fragment or analog thereof), cyclosporine, rapamycin or rapalog, or mTor inhibitor such as RAD001.

[1320] In any of the embodiments and aspects of the invention, including in any of the aforementioned aspects and embodiments, the population of cells may be enriched, for example, during manufacturing, for a particular subset or subpopulation, e.g., for T-cells, e.g., for stem-cell memory-like T cells.

[1321] In another aspect, a method of treating a subject, e.g., reducing or ameliorating, a hyperproliferative condition or disorder (e.g., a cancer), e.g., solid tumor, a soft tissue tumor, or a metastatic lesion, in a subject is provided. As used herein, the term “cancer” is meant to include all types of cancerous growths or oncogenic processes, metastatic tissues or malignantly transformed cells, tissues, or organs, irrespective of histopathologic type or stage of invasiveness. Examples of solid tumors include malignancies, e.g., sarcomas, adenocarcinomas, and carcinomas, of the various organ systems, such as those affecting liver, lung, breast, lymphoid, gastrointestinal (e.g., colon), genitourinary tract (e.g., renal, urothelial cells), prostate and pharynx. Adenocarcinomas include malignancies such as most colon cancers, rectal cancer, renal-cell carcinoma, liver cancer, non-small cell carcinoma of the lung, cancer of the small intestine and cancer of the esophagus. In one embodiment, the cancer is a melanoma, e.g., an advanced stage melanoma. Metastatic lesions of the aforementioned cancers can also be treated or prevented using the methods and compositions of the invention. Examples of other cancers that can be treated include bone cancer, pancreatic cancer, skin cancer, cancer of the head or neck, cutaneous or intraocular malignant melanoma, uterine cancer, ovarian cancer, rectal cancer, cancer of the anal region, stomach cancer, testicular cancer, uterine cancer, carcinoma of the fallopian tubes, carcinoma of the endometrium, carcinoma of the cervix, carcinoma of the vagina, carcinoma of the vulva, Hodgkin Disease, non-Hodgkin lymphoma, cancer of the esophagus, cancer of the small intestine, cancer of the endocrine system, cancer of the thyroid gland, cancer of the parathyroid gland, cancer of the adrenal gland, sarcoma of soft tissue, cancer of the urethra, cancer of the penis, chronic or acute leukemias including acute myeloid leukemia, chronic myeloid leukemia, acute lymphoblastic leukemia, chronic lymphocytic leukemia, solid tumors of childhood, lymphocytic lymphoma, cancer of the bladder, cancer of the kidney or ureter, carcinoma of the renal pelvis, neoplasm of the central nervous system (CNS), primary CNS lymphoma, tumor angiogenesis, spinal axis tumor, brain stem glioma, pituitary adenoma, Kaposi's sarcoma, epidermoid cancer, squamous cell cancer, T-cell lymphoma, environmentally induced cancers including those induced by asbestos, and combinations of said cancers. Treatment of metastatic cancers, e.g., metastatic cancers that express PD-L1 (Iwai et al. (2005) Int. Immunol. 17:133-144) can be effected using the antibody molecules described herein.

[1322] Exemplary cancers whose growth can be inhibited include cancers typically responsive to immunotherapy. Non-limiting examples of cancers for treatment include melanoma (e.g., metastatic malignant melanoma), renal cancer (e.g. clear cell carcinoma), prostate cancer (e.g. hormone refractory prostate adenocarcinoma), breast cancer, colon cancer and lung cancer (e.g. non-small cell lung cancer). Additionally, refractory or recurrent malignancies can be treated using the molecules described herein.

[1323] In one aspect, the invention pertains to a method of treating cancer in a subject. In one aspect, the cancer associated with expression of a cancer associate antigen as described herein is a hematological cancer. In one aspect, the hematological cancer is a leukemia or a lymphoma. In one aspect, a cancer associated with expression of a cancer associate antigen as described herein includes cancers and malignancies including, but not limited to, e.g., one or more acute leukemias including but not limited to, e.g., B-cell acute Lymphoid Leukemia (“BALL”), T-cell acute Lymphoid Leukemia (“TALL”), acute lymphoid leukemia (ALL); one or more chronic leukemias including but not limited to, e.g., chronic myelogenous leukemia (CML), Chronic Lymphoid Leukemia (CLL). Additional cancers or hematologic conditions associated with expression of a cancer associate antigen as described herein include, but are not limited to, e.g., B cell prolymphocytic leukemia, blastic plasmacytoid dendritic cell neoplasm, Burkitt's lymphoma, diffuse large B cell lymphoma, Follicular lymphoma, Hairy cell leukemia, small cell- or a large cell-follicular lymphoma, malignant lymphoproliferative conditions, MALT lymphoma, mantle cell lymphoma, Marginal zone lymphoma, multiple myeloma, myelodysplasia and myelodysplastic syndrome, non-Hodgkin lymphoma, plasmablastic lymphoma, plasmacytoid dendritic cell neoplasm, Waldenstrom macroglobulinemia, and “preleukemia” which are a diverse collection of hematological conditions united by ineffective production (or dysplasia) of myeloid blood cells, and the like. Further a disease associated with a cancer associate antigen as described herein expression include, but not limited to, e.g., atypical and/or non-classical cancers, malignancies, precancerous conditions or proliferative diseases associated with expression of a cancer associate antigen as described herein.

[1324] In some embodiments, a cancer that can be treated is multiple myeloma. Generally, myeloma cells are thought to be negative for a cancer associate antigen as described herein expression by flow cytometry. Thus, in some embodiments, a cell further engineered to express a CAR as described herein, e.g., a CD19 CAR or BCMA CAR as described herein, may be used to target myeloma cells. In some embodiments, cars of the present invention therapy can be used in combination with one or more additional therapies, e.g., lenalidomide treatment.

[1325] In various aspects, the immune effector cells (e.g., T cells, NK cells) of the invention administered to the patient, or their progeny, persist in the patient for at least four months, five months, six months, seven months, eight months, nine months, ten months, eleven months, twelve months, thirteen months, fourteen month, fifteen months, sixteen months, seventeen months, eighteen months, nineteen months, twenty months, twenty-one months, twenty-two months, twenty-three months, two years, three years, four years, or five years after administration of the T cell or NK cell to the patient.

[1326] The invention also includes a type of cellular therapy where immune effector cells (e.g., T cells, NK cells) are further modified, e.g., by in vitro transcribed RNA, to transiently express a chimeric antigen receptor (CAR) and the CAR T cell or NK cell is infused to a recipient in need thereof. The infused cell is able to kill tumor cells in the recipient. Thus, in various aspects, the immune effector cells (e.g., T cells, NK cells) administered to the patient, is present for less than one month, e.g., three weeks, two weeks, one week, after administration of the T cell or NK cell to the patient.

[1327] Without wishing to be bound by any particular theory, the anti-tumor immunity response elicited by the CAR-modified immune effector cells (e.g., T cells, NK cells) may be an active or a passive immune response, or alternatively may be due to a direct vs indirect immune response. In one aspect, the CAR transduced immune effector cells (e.g., T cells, NK cells) exhibit specific proinflammatory cytokine secretion and potent cytolytic activity in response to human cancer cells expressing the a cancer associate antigen as described herein, resist soluble a cancer associate antigen as described herein inhibition, mediate bystander killing and mediate regression of an established human tumor. For example, antigen-less tumor cells within a heterogeneous field of a cancer associate antigen as described herein-expressing tumor may be susceptible to indirect destruction by a cancer associate antigen as described herein-redirected immune effector cells (e.g., T cells, NK cells) that has previously reacted against adjacent antigen-positive cancer cells.

[1328] Ex vivo procedures are well known in the art and are discussed more fully below. Briefly, cells are isolated from a mammal (e.g., a human) and genetically modified (i.e., transduced or transfected in vitro) with a gRNA molecule of the invention, and optionally, a vector expressing a CAR disclosed herein. The modified cell can be administered to a mammalian recipient to provide a therapeutic benefit. The mammalian recipient may be a human and the cell can be autologous with respect to the recipient. Alternatively, the cells can be allogeneic with respect to the recipient.

[1329] The procedure for ex vivo expansion of hematopoietic stem and progenitor cells is described in U.S. Pat. No. 5,199,942, incorporated herein by reference, can be applied to the cells of the present invention. Other suitable methods are known in the art, therefore the present invention is not limited to any particular method of ex vivo expansion of the cells. Briefly, ex vivo culture and expansion of immune effector cells (e.g., T cells, NK cells) comprises: (1) collecting CD34+ hematopoietic stem and progenitor cells from a mammal from peripheral blood harvest or bone marrow explants; and (2) expanding such cells ex vivo. In addition to the cellular growth factors described in U.S. Pat. No. 5,199,942, other factors such as flt3-L, IL-1, IL-3 and c-kit ligand, can be used for culturing and expansion of the cells.

[1330] Procedures for ex vivo expansion of immune effector cells, e.g., T cells, are described, for example, in WO2015/142675, the contents of which are hereby incorporated by reference in their entirety. Such procedures may be useful when used in conjunction with the methods described herein.

[1331] In addition to using a cell-based vaccine in terms of ex vivo immunization, the present invention also provides compositions and methods for in vivo immunization to elicit an immune response directed against an antigen in a patient.

[1332] Generally, the cells activated and expanded as described herein may be utilized in the treatment and prevention of diseases that arise in individuals who are immunocompromised. In particular, the CAR-modified immune effector cells (e.g., T cells, NK cells) of the invention are used in the treatment of diseases, disorders and conditions associated with expression of a cancer associate antigen as described herein. In certain aspects, the cells of the invention are used in the treatment of patients at risk for developing diseases, disorders and conditions associated with expression of a cancer associate antigen as described herein. Thus, the present invention provides methods for the treatment or prevention of diseases, disorders and conditions associated with expression of a cancer associate antigen as described herein comprising administering to a subject in need thereof, a therapeutically effective amount of the CAR-modified immune effector cells (e.g., T cells, NK cells) of the invention.

[1333] In one aspect the cells of the invention, including the cells further engineered to express a CAR, may be used to treat a proliferative disease such as a cancer or malignancy or is a precancerous condition such as a myelodysplasia, a myelodysplastic syndrome or a preleukemia. Further a disease associated with a cancer associate antigen as described herein expression include, but not limited to, e.g., atypical and/or non-classical cancers, malignancies, precancerous conditions or proliferative diseases expressing a cancer associated antigen as described herein. Non-cancer related indications associated with expression of a cancer associate antigen as described herein include, but are not limited to, e.g., autoimmune disease, (e.g., lupus), inflammatory disorders (allergy and asthma) and transplantation.

[1334] The cells (e.g., T cells, NK cells) of the present invention may be administered either alone, or as a pharmaceutical composition in combination with diluents and/or with other components such as IL-2 or other cytokines or cell populations.

### Hematologic Cancer

[1335] Hematological cancer conditions are the types of cancer such as leukemia, lymphoma, and malignant lymphoproliferative conditions that affect blood, bone marrow and the lymphatic system.

[1336] Leukemia can be classified as acute leukemia and chronic leukemia. Acute leukemia can be further classified as acute myelogenous leukemia (AML) and acute lymphoid leukemia (ALL). Chronic leukemia includes chronic myelogenous leukemia (CML) and chronic lymphoid leukemia (CLL). Other related conditions include myelodysplastic syndromes (MDS, formerly known as “preleukemia”) which are a diverse collection of hematological conditions united by ineffective production (or dysplasia) of myeloid blood cells and risk of transformation to AML.

[1337] Lymphoma is a group of blood cell tumors that develop from lymphocytes. Exemplary lymphomas include non-Hodgkin lymphoma and Hodgkin lymphoma.

[1338] The present invention also provides methods for inhibiting the proliferation or reducing a cancer associated antigen as described herein-expressing cell population, the methods comprising contacting a population of cells comprising a cancer associated antigen as described herein-expressing cell with a cell of the invention (e.g., an NK cell or T cell) further engineered to express a CAR that binds to the a cancer associated antigen as described herein-expressing cell. In a specific aspect, the present invention provides methods for inhibiting the proliferation or reducing the population of cancer cells expressing a cancer associated antigen as described herein, the methods comprising contacting a cancer associate antigen as described herein-expressing cancer cell population with a T cell or NK cell of the invention further engineered to express a CAR that binds to a cancer associated antigen as described herein-expressing cell. In one aspect, the present invention provides methods for inhibiting the proliferation or reducing the population of cancer cells expressing a cancer associated antigen as described herein, the methods comprising contacting a cancer associated antigen as described herein-expressing cancer cell population with a T cell or NK cell of the invention further engineered to express a CAR that binds to a cancer associated antigen as described herein-expressing cell. In certain aspects, T cell or NK cell of the invention reduces the quantity, number, amount or percentage of cells and/or cancer cells by at least 25%, at least 30%, at least 40%, at least 50%, at least 65%, at least 75%, at least 85%, at least 95%, or at least 99% in a subject with or animal model for myeloid leukemia or another cancer associated with a cancer associated antigen as described herein-expressing cells relative to a negative control. In one aspect, the subject is a human.

[1339] The present invention also provides methods for preventing, treating and/or managing a disease associated with a cancer associated antigen as described herein-expressing cells (e.g., a hematologic cancer or atypical cancer expressing a cancer associated antigen as described herein), the methods comprising administering to a subject in need a T cell or NK cell of the invention, including those further engineered to express a CAR that binds to a cancer associated antigen as described herein-expressing cell. In one aspect, the subject is a human. Non-limiting examples of disorders associated with a cancer associated antigen as described herein-expressing cells include autoimmune disorders (such as lupus), inflammatory disorders (such as allergies and asthma) and cancers (such as hematological cancers or atypical cancers expressing a cancer associated antigen as described herein).

[1340] The present invention also provides methods for preventing, treating and/or managing a disease associated with a cancer associated antigen as described herein-expressing cells, the methods comprising administering to a subject in need a T cell or NK cell of the invention, including those further engineered to express a CAR that binds to a cancer associated antigen as described herein-expressing cell. In one aspect, the subject is a human.

[1341] The present invention provides methods for preventing relapse of cancer associated with a cancer associated antigen as described herein-expressing cells, the methods comprising administering to a subject in need thereof a T cell or NK cell of the invention, including those further engineered to express a CAR that binds to a cancer associated antigen as described herein-expressing cell. In one aspect, the methods comprise administering cell in combination with an effective amount of another therapy.

### Pharmaceutical Compositions and Treatments

[1342] Pharmaceutical compositions of the present invention may comprise a cell, e.g., a plurality of cells, as described herein, in combination with one or more pharmaceutically or physiologically acceptable carriers, diluents or excipients. Such compositions may comprise buffers such as neutral buffered saline, phosphate buffered saline and the like; carbohydrates such as glucose, mannose, sucrose or dextrans, mannitol; proteins; polypeptides or amino acids such as glycine; antioxidants; chelating agents such as EDTA or glutathione; adjuvants (e.g., aluminum hydroxide); and preservatives. Compositions of the present invention are in one aspect formulated for intravenous administration.

[1343] Pharmaceutical compositions of the present invention may be administered in a manner appropriate to the disease to be treated (or prevented). The quantity and frequency of administration will be determined by such factors as the condition of the patient, and the type and severity of the patient's disease, although appropriate dosages may be determined by clinical trials.

[1344] In one embodiment, the pharmaceutical composition is substantially free of, e.g., there are no detectable levels of a contaminant, e.g., selected from the group consisting of endotoxin, mycoplasma, replication competent lentivirus (RCL), p24, VSV-G nucleic acid, HIV gag, residual anti-CD3/anti-CD28 coated beads, mouse antibodies, pooled human serum, bovine serum albumin, bovine serum, culture media components, vector packaging cell or plasmid components, a bacterium and a fungus. In one embodiment, the bacterium is at least one selected from the group consisting of Alcaligenes faecalis, Candida albicans, Escherichia coli, Haemophilus influenza, Neisseria meningitides, Pseudomonas aeruginosa, Staphylococcus aureus, Streptococcus pneumonia, and Streptococcus pyogenes group A.

[1345] When “an immunologically effective amount,” “an anti-tumor effective amount,” “a tumor-inhibiting effective amount,” or “therapeutic amount” is indicated, the precise amount of the compositions of the present invention to be administered can be determined by a physician with consideration of individual differences in age, weight, tumor size, extent of infection or metastasis, and condition of the patient (subject). It can generally be stated that a pharmaceutical composition comprising the immune effector cells (e.g., T cells, NK cells) described herein may be administered at a dosage of 10⁴ to 10⁹ cells/kg body weight, in some instances 10⁵ to 10⁶ cells/kg body weight, including all integer values within those ranges. T cell compositions may also be administered multiple times at these dosages. The cells can be administered by using infusion techniques that are commonly known in immunotherapy (see, e.g., Rosenberg et al., New Eng. J. of Med. 319:1676, 1988).

[1346] In certain aspects, it may be desired to administer activated immune effector cells (e.g., T cells, NK cells) to a subject and then subsequently redraw blood (or have an apheresis performed), activate immune effector cells (e.g., T cells, NK cells) therefrom according to the present invention, and reinfuse the patient with these activated and expanded immune effector cells (e.g., T cells, NK cells). This process can be carried out multiple times every few weeks. In certain aspects, immune effector cells (e.g., T cells, NK cells) can be activated from blood draws of from 10 cc to 400 cc. In certain aspects, immune effector cells (e.g., T cells, NK cells) are activated from blood draws of 20 cc, 30 cc, 40 cc, 50 cc, 60 cc, 70 cc, 80 cc, 90 cc, or 100 cc.

[1347] The administration of the subject compositions may be carried out in any convenient manner, including by aerosol inhalation, injection, ingestion, transfusion, implantation or transplantation. The compositions described herein may be administered to a patient trans arterially, subcutaneously, intradermally, intratumorally, intranodally, intramedullary, intramuscularly, by intravenous (i.v.) injection, or intraperitoneally. In one aspect, the T cell compositions of the present invention are administered to a patient by intradermal or subcutaneous injection. In one aspect, the T cell compositions of the present invention are administered by i.v. injection. The compositions of immune effector cells (e.g., T cells, NK cells) may be injected directly into a tumor, lymph node, or site of infection.

[1348] In a particular exemplary aspect, subjects may undergo leukapheresis, wherein leukocytes are collected, enriched, or depleted ex vivo to select and/or isolate the cells of interest, e.g., T cells. These T cell isolates may be expanded by methods known in the art and treated as described herein thereby creating a T cell of the invention. Subjects in need thereof may subsequently undergo standard treatment with high dose chemotherapy followed by peripheral blood stem cell transplantation. In certain aspects, following or concurrent with the transplant, subjects receive an infusion of the expanded T cells of the present invention. In an additional aspect, expanded cells are administered before or following surgery.

[1349] The dosage of the above treatments to be administered to a patient will vary with the precise nature of the condition being treated and the recipient of the treatment. The scaling of dosages for human administration can be performed according to art-accepted practices. The dose for CAMPATH, for example, will generally be in the range 1 to about 100 mg for an adult patient, usually administered daily for a period between 1 and 30 days. The preferred daily dose is 1 to 10 mg per day although in some instances larger doses of up to 40 mg per day may be used (described in U.S. Pat. No. 6,120,766).

[1350] In one aspect, CAR-expressing cells of the present inventions are generated using lentiviral viral vectors, such as lentivirus. Cells, e.g., CARTs, generated that way will have stable CAR expression.

[1351] In one aspect, CAR-expressing cells, e.g., CARTs, are generated using a viral vector such as a gammaretroviral vector, e.g., a gammaretroviral vector described herein. CARTs generated using these vectors can have stable CAR expression.

[1352] In one aspect, CARTs transiently express CAR vectors for 4, 5, 6, 7, 8, 9, 10, 11, 12, 13, 14, 15 days after transduction. Transient expression of CARs can be effected by RNA CAR vector delivery. In one aspect, the CAR RNA is transduced into the T cell by electroporation.

[1353] A potential issue that can arise in patients being treated using transiently expressing CAR immune effector cells (e.g., T cells, NK cells) (particularly with murine scFv bearing CARTs) is anaphylaxis after multiple treatments.

[1354] Without being bound by this theory, it is believed that such an anaphylactic response might be caused by a patient developing humoral anti-CAR response, i.e., anti-CAR antibodies having an anti-IgE isotype. It is thought that a patient's antibody producing cells undergo a class switch from IgG isotype (that does not cause anaphylaxis) to IgE isotype when there is a ten to fourteen day break in exposure to antigen.

[1355] If a patient is at high risk of generating an anti-CAR antibody response during the course of transient CAR therapy (such as those generated by RNA transductions), CART infusion breaks should not last more than ten to fourteen days.

### Methods of Making Modified CAR-Expressing Cells

[1356] In another aspect, the invention pertains to a method of making a cell (e.g., an immune effector cell or population thereof) comprising introducing into (e.g., transducing) a cell, e.g., a T cell or a NK cell described herein, with a vector of comprising a nucleic acid encoding a CAR, e.g., a CAR described herein; or a nucleic acid encoding a CAR molecule e.g., a CAR described herein.

[1357] The cell in the methods is an immune effector cell (e.g., a T cell or a NK cell, or a combination thereof). In some embodiments, the cell in the methods is diaglycerol kinase (DGK) and/or Ikaros deficient.

[1358] In some embodiments, the introducing the nucleic acid molecule encoding a CAR comprises transducing a vector comprising the nucleic acid molecule encoding a CAR, or transfecting the nucleic acid molecule encoding a CAR, wherein the nucleic acid molecule is an in vitro transcribed RNA.

[1359] In some embodiments, the method further comprises:
[1360] providing a population of immune effector cells (e.g., T cells or NK cells); and removing T regulatory cells from the population, thereby providing a population of T regulatory-depleted cells;
[1361] wherein steps a) and b) are performed prior to introducing the nucleic acid encoding the CAR and/or CRISPR system to the population.

[1362] In embodiments of the methods, the T regulatory cells comprise CD25+ T cells, and are removed from the cell population using an anti-CD25 antibody, or fragment thereof. The anti-CD25 antibody, or fragment thereof, can be conjugated to a substrate, e.g., a bead.

[1363] In other embodiments, the population of T regulatory-depleted cells provided from step (b) contains less than 30%, 25%, 20%, 15%, 10%, 5%, 4%, 3%, 2%, 1% of CD25+ cells.

[1364] In yet other embodiments, the method further comprises removing cells from the population which express a tumor antigen that does not comprise CD25 to provide a population of T regulatory-depleted and tumor antigen depleted cells prior to introducing the nucleic acid encoding a CAR to the population. The tumor antigen can be selected from CD19, CD30, CD38, CD123, CD20, CD14 or CD11b, or a combination thereof.

[1365] In other embodiments, the method further comprises removing cells from the population which express a checkpoint inhibitor, to provide a population of T regulatory-depleted and inhibitory molecule depleted cells prior to introducing the nucleic acid encoding a CAR or CRISPR system to the population. The checkpoint inhibitor can be chosen from PD-1, LAG-3, TIM3, B7-H1, CD160, P1H, 2B4, CEACAM (e.g., CEACAM-1, CEACAM-3, and/or CEACAM-5), TIGIT, CTLA-4, BTLA, and LAIR1. Further embodiments disclosed herein encompass providing a population of immune effector cells. The population of immune effector cells provided can be selected based upon the expression of one or more of CD3, CD28, CD4, CD8, CD45RA, and/or CD45RO. In certain embodiments, the population of immune effector cells provided are CD3+ and/or CD28+.

[1366] In certain embodiments of the method, the method further comprises expanding the population of cells after the nucleic acid molecule encoding a CAR has been introduced.

[1367] In embodiments, the population of cells is expanded for a period of 8 days or less.

[1368] In certain embodiments, the population of cells is expanded in culture for 5 days, and the resulting cells are more potent than the same cells expanded in culture for 9 days under the same culture conditions.

[1369] In other embodiments, the population of cells is expanded in culture for 5 days show at least a one, two, three or four fold increase in cell doublings upon antigen stimulation as compared to the same cells expanded in culture for 9 days under the same culture conditions.

[1370] In yet other embodiments, the population of cells is expanded in culture for 5 days, and the resulting cells exhibit higher proinflammatory IFN-γ and/or GM-CSF levels, as compared to the same cells expanded in culture for 9 days under the same culture conditions.

[1371] In other embodiments, the population of cells is expanded by culturing the cells in the presence of an agent that stimulates a CD3/TCR complex associated signal and/or a ligand that stimulates a costimulatory molecule on the surface of the cells. The agent can be a bead conjugated with anti-CD3 antibody, or a fragment thereof, and/or anti-CD28 antibody, or a fragment thereof.

[1372] In other embodiments, the population of cells is expanded in an appropriate media that includes one or more interleukin that result in at least a 200-fold, 250-fold, 300-fold, or 350-fold increase in cells over a 14 day expansion period, as measured by flow cytometry.

[1373] In other embodiments, the population of cells is expanded in the presence IL-15 and/or IL-7.

[1374] In certain embodiments, the method further includes cryopreserving the population of the cells after the appropriate expansion period.

[1375] In yet other embodiments, the method of making disclosed herein further comprises contacting the population of immune effector cells with a nucleic acid encoding a telomerase subunit, e.g., hTERT. The the nucleic acid encoding the telomerase subunit can be DNA.

[1376] The present invention also provides a method of generating a population of RNA-engineered cells, e.g., cells described herein, e.g., immune effector cells (e.g., T cells, NK cells), transiently expressing exogenous RNA. The method comprises introducing an in vitro transcribed RNA or synthetic RNA into a cell, where the RNA comprises a nucleic acid encoding a CAR molecule described herein.

[1377] In another aspect, the invention pertains to a method of providing an anti-tumor immunity in a subject comprising administering to the subject an effective amount of a cell comprising a CAR molecule, e.g., a cell expressing a CAR molecule described herein. In one embodiment, the cell is an autologous T cell or NK cell. In one embodiment, the cell is an allogeneic T cell or NK cell. In one embodiment, the subject is a human.

[1378] In one aspect, the invention includes a population of autologous cells that are transfected or transduced with a vector comprising a nucleic acid molecule encoding a CAR molecule, e.g., as described herein. In one embodiment, the vector is a retroviral vector. In one embodiment, the vector is a self-inactivating lentiviral vector as described elsewhere herein. In one embodiment, the vector is delivered (e.g., by transfecting or electroporating) to a cell, e.g., a T cell or a NK cell, wherein the vector comprises a nucleic acid molecule encoding a CAR of the present invention as described herein, which is transcribed as an mRNA molecule, and the CARs of the present invention is translated from the RNA molecule and expressed on the surface of the cell.

[1379] In another aspect, the present invention provides a population of CAR-expressing cells, e.g., CAR-expressing immune effector cells (e.g., T cells or NK cells). In some embodiments, the population of CAR-expressing cells comprises a mixture of cells expressing different CARs. For example, in one embodiment, the population of CAR-expressing immune effector cells (e.g., T cells or NK cells) can include a first cell expressing a CAR having an antigen binding domain that binds to a first tumor antigen as described herein, and a second cell expressing a CAR having a different antigen binding domain that binds to a second tumor antigen as described herein. As another example, the population of CAR-expressing cells can include a first cell expressing a CAR that includes an antigen binding domain that binds to a tumor antigen as described herein, and a second cell expressing a CAR that includes an antigen binding domain to a target other than a tumor antigen as described herein. In one embodiment, the population of CAR-expressing cells includes, e.g., a first cell expressing a CAR that includes a primary intracellular signaling domain, and a second cell expressing a CAR that includes a secondary signaling domain, e.g., a costimulatory signaling domain.

[1380] In another aspect, the present invention provides a population of cells wherein at least one cell in the population expresses a CAR having an antigen binding domain that binds to a tumor antigen as described herein, and a second cell expressing another agent, e.g., an agent which enhances the activity of a CAR-expressing cell. For example, in one embodiment, the agent can be an agent which inhibits an inhibitory molecule. Examples of inhibitory molecules include PD-1, PD-L1, CTLA-4, TIM-3, CEACAM (e.g., CEACAM-1, CEACAM-3 and/or CEACAM-5), LAG-3, VISTA, BTLA, TIGIT, LAIR1, CD160, 2B4 and TGF beta. In one embodiment, the agent which inhibits an inhibitory molecule, e.g., is a molecule described herein, e.g., an agent that comprises a first polypeptide, e.g., an inhibitory molecule, associated with a second polypeptide that provides a positive signal to the cell, e.g., an intracellular signaling domain described herein. In one embodiment, the agent comprises a first polypeptide, e.g., of an inhibitory molecule such as PD-1, LAG-3, CTLA-4, CD160, BTLA, LAIR1, TIM-3, CEACAM (e.g., CEACAM-1, CEACAM-3 and/or CEACAM-5), 2B4 and TIGIT, or a fragment of any of these, and a second polypeptide which is an intracellular signaling domain described herein (e.g., comprising a costimulatory domain (e.g., 41BB, CD27 or CD28, e.g., as described herein) and/or a primary signaling domain (e.g., a CD3 zeta signaling domain described herein). In one embodiment, the agent comprises a first polypeptide of PD-1 or a fragment thereof, and a second polypeptide of an intracellular signaling domain described herein (e.g., a CD28, CD27, OX40 or 4-IBB signaling domain described herein and/or a CD3 zeta signaling domain described herein).

[1381] In one embodiment, the nucleic acid molecule encoding a CAR of the present invention molecule, e.g., as described herein, is expressed as an mRNA molecule. In one embodiment, the genetically modified CAR of the present invention-expressing cells, e.g., immune effector cells (e.g., T cells, NK cells), can be generated by transfecting or electroporating an RNA molecule encoding the desired CARs (e.g., without a vector sequence) into the cell. In one embodiment, a CAR of the present invention molecule is translated from the RNA molecule once it is incorporated and expressed on the surface of the recombinant cell.

[1382] A method for generating mRNA for use in transfection involves in vitro transcription (IVT) of a template with specially designed primers, followed by polyA addition, to produce a construct containing 3′ and 5′ untranslated sequence (“UTR”) (e.g., a 3′ and/or 5′ UTR described herein), a 5′ cap (e.g., a 5′ cap described herein) and/or Internal Ribosome Entry Site (IRES) (e.g., an IRES described herein), the nucleic acid to be expressed, and a polyA tail, typically 50-2000 bases in length (SEQ ID NO: 6638). RNA so produced can efficiently transfect different kinds of cells. In one embodiment, the template includes sequences for the CAR. In an embodiment, an RNA CAR vector is transduced into a cell, e.g., a T cell or a NK cell, by electroporation.

### XII. Methods of Manufacture

[1383] The disclosure provides methods of manufacturing cells, e.g., T cells, e.g., allogeneic T cells, e.g., CAR-engineered cells modified, or to be modified, with the gRNA molecules described herein.

### Introduction of CRISPR Systems

[1384] The invention comprises cells, e.g immune effector cells, e.g., allogeneic or autologous cells, which comprise, or at one time comprised, one or more gRNA molecules as described herein. The CRISPR systems described herein may be introduced into the cells by any of the methods described herein. The cells may further be engineered to express a CAR as described herein.

[1385] In one aspect, the disclosure provides a method for making a cell comprising:
[1386] a) introducing a gRNA molecule, or nucleic acid encoding said gRNA molecule, as described herein into said cell;
[1387] b) introducing a Cas9 molecule as described herein, or nucleic acid encoding said Cas9 molecule, into said cell;
[1388] c) introducing nucleic acid encoding a CAR into said cell; and
[1389] d) expanding and activating the cells.

[1390] In embodiments, the introduction of a) and b) occur before steps c) and d). In embodiments, the introduction of c) occurs before the introduction of a) and b). In embodiments, the introduction of c) and the expanding and activating of d) occurs before the introduction of a) and b). In embodiments, the method further comprises e) selecting the cells which are CAR-expressing. In embodiments, the method further comprises f) selecting the cells which have no or reduced expression of the gene targeted by the gRNA molecule of step a). For example, if the gRNA molecule comprises a targeting domain complementary to a target sequence in the TRAC gene (e.g., comprises a targeting domain comprising any one of SEQ ID NO: 5816 to SEQ ID NO: 5965 or SEQ ID NO: 5528 to SEQ ID NO: 5623), after the introduction of a) and b), cells which lack TCR expression (e.g., as detectible by, for example, an anti-CD3 antibody) may be sorted for further application in the methods of manufacture as described herein, or for further application in the therapeutic methods described herein. Such sorting may be done by methods known in the art such as cell sorting or mechanical separation (e.g., separation by magnetic bead-bound anti-CD3 antibody to remove those cells still expressing CD3/TCR).

### Expansion and Activation of Cells

[1391] Immune effector cells such as T cells may be activated and expanded generally using methods as described, for example, in U.S. Pat. Nos. 6,352,694; 6,534,055; 6,905,680; 6,692,964; 5,858,358; 6,887,466; 6,905,681; 7,144,575; 7,067,318; 7,172,869; 7,232,566; 7,175,843; 5,883,223; 6,905,874; 6,797,514; 6,867,041; and U.S. Patent Application Publication No. 20060121005, each of which is incorporated by reference in its entirety.

[1392] Generally, a population of immune effector cells e.g., T regulatory cell depleted cells, may be expanded by contact with a surface having attached thereto an agent that stimulates a CD3/TCR complex associated signal and a ligand that stimulates a costimulatory molecule on the surface of the T cells. In particular, T cell populations may be stimulated as described herein, such as by contact with an anti-CD3 antibody, or antigen-binding fragment thereof, or an anti-CD2 antibody immobilized on a surface, or by contact with a protein kinase C activator (e.g., bryostatin) in conjunction with a calcium ionophore. For co-stimulation of an accessory molecule on the surface of the T cells, a ligand that binds the accessory molecule is used. For example, a population of T cells can be contacted with an anti-CD3 antibody and an anti-CD28 antibody, under conditions appropriate for stimulating proliferation of the T cells. To stimulate proliferation of either CD4+ T cells or CD8+ T cells, an anti-CD3 antibody and an anti-CD28 antibody can be used. Examples of an anti-CD28 antibody include 9.3, B-T3, XR-CD28 (Diaclone, Besançon, France) can be used as can other methods commonly known in the art (Berg et al., Transplant Proc. 30(8):3975-3977, 1998; Haanen et al., J. Exp. Med. 190(9):13191328, 1999; Garland et al., J. Immunol Meth. 227(1-2):53-63, 1999).

[1393] In embodiments in which the cells have reduced or absent levels of expression or levels of a component of the TCR, activation may be achieved through means other than interaction with CD3. In cells which further express a CAR, activation may be achieved by contacting said cells with the antigen bound by the antigen-binding domain of the CAR, or a fragment thereof capable of binding the CAR. Such antigen or fragment thereof may be present on, for example, an antibody scaffold, a cell (e.g., an antigen presenting cell, e.g., a cell which naturally expresses said antigen or one which has been artificially engineered to express said antigen on its cell surface), or a solid support such as a bead or membrane.

[1394] In certain aspects, the primary stimulatory signal and the costimulatory signal for the T cell may be provided by different protocols. For example, the agents providing each signal may be in solution or coupled to a surface. When coupled to a surface, the agents may be coupled to the same surface (i.e., in “cis” formation) or to separate surfaces (i.e., in “trans” formation). Alternatively, one agent may be coupled to a surface and the other agent in solution. In one aspect, the agent providing the costimulatory signal is bound to a cell surface and the agent providing the primary activation signal is in solution or coupled to a surface. In certain aspects, both agents can be in solution. In one aspect, the agents may be in soluble form, and then cross-linked to a surface, such as a cell expressing Fc receptors or an antibody or other binding agent which will bind to the agents. In this regard, see for example, U.S. Patent Application Publication Nos. 20040101519 and 20060034810 for artificial antigen presenting cells (aAPCs) that are contemplated for use in activating and expanding T cells in the present invention.

[1395] In one aspect, the two agents are immobilized on beads, either on the same bead, i.e., “cis,” or to separate beads, i.e., “trans.” By way of example, the agent providing the primary activation signal is an anti-CD3 antibody or an antigen-binding fragment thereof and the agent providing the costimulatory signal is an anti-CD28 antibody or antigen-binding fragment thereof; and both agents are co-immobilized to the same bead in equivalent molecular amounts. In one aspect, a 1:1 ratio of each antibody bound to the beads for CD4+ T cell expansion and T cell growth is used. In certain aspects of the present invention, a ratio of anti CD3:CD28 antibodies bound to the beads is used such that an increase in T cell expansion is observed as compared to the expansion observed using a ratio of 1:1. In one particular aspect an increase of from about 1 to about 3 fold is observed as compared to the expansion observed using a ratio of 1:1. In one aspect, the ratio of CD3:CD28 antibody bound to the beads ranges from 100:1 to 1:100 and all integer values there between. In one aspect, more anti-CD28 antibody is bound to the particles than anti-CD3 antibody, i.e., the ratio of CD3:CD28 is less than one. In certain aspects, the ratio of anti CD28 antibody to anti CD3 antibody bound to the beads is greater than 2:1. In one particular aspect, a 1:100 CD3:CD28 ratio of antibody bound to beads is used. In one aspect, a 1:75 CD3:CD28 ratio of antibody bound to beads is used. In a further aspect, a 1:50 CD3:CD28 ratio of antibody bound to beads is used. In one aspect, a 1:30 CD3:CD28 ratio of antibody bound to beads is used. In one preferred aspect, a 1:10 CD3:CD28 ratio of antibody bound to beads is used. In one aspect, a 1:3 CD3:CD28 ratio of antibody bound to the beads is used. In yet one aspect, a 3:1 CD3:CD28 ratio of antibody bound to the beads is used.

[1396] Ratios of particles to cells from 1:500 to 500:1 and any integer values in between may be used to stimulate T cells or other target cells. As those of ordinary skill in the art can readily appreciate, the ratio of particles to cells may depend on particle size relative to the target cell. For example, small sized beads could only bind a few cells, while larger beads could bind many. In certain aspects the ratio of cells to particles ranges from 1:100 to 100:1 and any integer values in-between and in further aspects the ratio comprises 1:9 to 9:1 and any integer values in between, can also be used to stimulate T cells. The ratio of anti-CD3- and anti-CD28-coupled particles to T cells that result in T cell stimulation can vary as noted above, however certain preferred values include 1:100, 1:50, 1:40, 1:30, 1:20, 1:10, 1:9, 1:8, 1:7, 1:6, 1:5, 1:4, 1:3, 1:2, 1:1, 2:1, 3:1, 4:1, 5:1, 6:1, 7:1, 8:1, 9:1, 10:1, and 15:1 with one preferred ratio being at least 1:1 particles per T cell. In one aspect, a ratio of particles to cells of 1:1 or less is used. In one particular aspect, a preferred particle:cell ratio is 1:5. In further aspects, the ratio of particles to cells can be varied depending on the day of stimulation. For example, in one aspect, the ratio of particles to cells is from 1:1 to 10:1 on the first day and additional particles are added to the cells every day or every other day thereafter for up to 10 days, at final ratios of from 1:1 to 1:10 (based on cell counts on the day of addition). In one particular aspect, the ratio of particles to cells is 1:1 on the first day of stimulation and adjusted to 1:5 on the third and fifth days of stimulation. In one aspect, particles are added on a daily or every other day basis to a final ratio of 1:1 on the first day, and 1:5 on the third and fifth days of stimulation. In one aspect, the ratio of particles to cells is 2:1 on the first day of stimulation and adjusted to 1:10 on the third and fifth days of stimulation. In one aspect, particles are added on a daily or every other day basis to a final ratio of 1:1 on the first day, and 1:10 on the third and fifth days of stimulation. One of skill in the art will appreciate that a variety of other ratios may be suitable for use in the present invention. In particular, ratios will vary depending on particle size and on cell size and type. In one aspect, the most typical ratios for use are in the neighborhood of 1:1, 2:1 and 3:1 on the first day.

[1397] In further aspects, the cells, such as T cells, are combined with agent-coated beads, the beads and the cells are subsequently separated, and then the cells are cultured. In an alternative aspect, prior to culture, the agent-coated beads and cells are not separated but are cultured together. In a further aspect, the beads and cells are first concentrated by application of a force, such as a magnetic force, resulting in increased ligation of cell surface markers, thereby inducing cell stimulation.

[1398] By way of example, cell surface proteins may be ligated by allowing paramagnetic beads to which anti-CD3 and anti-CD28 are attached (3×28 beads) to contact the T cells. In one aspect the cells (for example, 10⁴ to 10⁹ T cells) and beads (for example, DYNABEADS® M-450 CD3/CD28 T paramagnetic beads at a ratio of 1:1) are combined in a buffer, for example PBS (without divalent cations such as, calcium and magnesium). Again, those of ordinary skill in the art can readily appreciate any cell concentration may be used. For example, the target cell may be very rare in the sample and comprise only 0.010% of the sample or the entire sample (i.e., 100%) may comprise the target cell of interest. Accordingly, any cell number is within the context of the present invention. In certain aspects, it may be desirable to significantly decrease the volume in which particles and cells are mixed together (i.e., increase the concentration of cells), to ensure maximum contact of cells and particles. For example, in one aspect, a concentration of about 10 billion cells/ml, 9 billion/ml, 8 billion/ml, 7 billion/ml, 6 billion/ml, 5 billion/ml, or 2 billion cells/ml is used. In one aspect, greater than 100 million cells/ml is used. In a further aspect, a concentration of cells of 10, 15, 20, 25, 30, 35, 40, 45, or 50 million cells/ml is used. In yet one aspect, a concentration of cells from 75, 80, 85, 90, 95, or 100 million cells/ml is used. In further aspects, concentrations of 125 or 150 million cells/ml can be used. Using high concentrations can result in increased cell yield, cell activation, and cell expansion. Further, use of high cell concentrations allows more efficient capture of cells that may weakly express target antigens of interest, such as CD28-negative T cells. Such populations of cells may have therapeutic value and would be desirable to obtain in certain aspects. For example, using high concentration of cells allows more efficient selection of CD8+ T cells that normally have weaker CD28 expression.

[1399] In one embodiment, cells of the invention, e.g., cells comprising or which at any time comprised or will comprise a gRNA molecule as described herein, e.g., said cells transduced with a nucleic acid encoding a CAR, e.g., a CAR described herein, are expanded, e.g., by a method described herein. In one embodiment, the cells are expanded in culture for a period of several hours (e.g., about 2, 3, 4, 5, 6, 7, 8, 9, 10, 15, 18, 21 hours) to about 14 days (e.g., 1, 2, 3, 4, 5, 6, 7, 8, 9, 10, 11, 12, 13 or 14 days). In one embodiment, the cells are expanded for a period of 4 to 9 days. In one embodiment, the cells are expanded for a period of 8 days or less, e.g., 7, 6 or 5 days. In one embodiment, the cells are expanded in culture for 5 days, and the resulting cells are more potent than the same cells expanded in culture for 9 days under the same culture conditions. Potency can be defined, e.g., by various T cell functions, e.g. proliferation, target cell killing, cytokine production, activation, migration, or combinations thereof. In one embodiment, the cells are expanded for 5 days show at least a one, two, three or four fold increase in cells doublings upon antigen stimulation as compared to the same cells expanded in culture for 9 days under the same culture conditions. In one embodiment, the cells are expanded in culture for 5 days, and the resulting cells exhibit higher proinflammatory cytokine production, e.g., IFN-γ and/or GM-CSF levels, as compared to the same cells expanded in culture for 9 days under the same culture conditions. In one embodiment, the cells expanded for 5 days show at least a one, two, three, four, five, ten fold or more increase in pg/ml of proinflammatory cytokine production, e.g., IFN-γ and/or GM-CSF levels, as compared to the same cells expanded in culture for 9 days under the same culture conditions.

[1400] Several cycles of stimulation may also be desired such that culture time of T cells can be 60 days or more. Conditions appropriate for T cell culture include an appropriate media (e.g., Minimal Essential Media or RPMI Media 1640 or, X-vivo 15, (Lonza)) that may contain factors necessary for proliferation and viability, including serum (e.g., fetal bovine or human serum), interleukin-2 (IL-2), insulin, IFN-γ, IL-4, IL-7, GM-CSF, IL-10, IL-12, IL-15, TGFβ, and TNF-α or any other additives for the growth of cells known to the skilled artisan. Other additives for the growth of cells include, but are not limited to, surfactant, plasmanate, and reducing agents such as N-acetyl-cysteine and 2-mercaptoethanol. Media can include RPMI 1640, AIM-V, DMEM, MEM, α-MEM, F-12, X-Vivo 15, and X-Vivo 20, Optimizer, with added amino acids, sodium pyruvate, and vitamins, either serum-free or supplemented with an appropriate amount of serum (or plasma) or a defined set of hormones, and/or an amount of cytokine(s) sufficient for the growth and expansion of T cells. Antibiotics, e.g., penicillin and streptomycin, are included only in experimental cultures, not in cultures of cells that are to be infused into a subject. The target cells are maintained under conditions necessary to support growth, for example, an appropriate temperature (e.g., 37° C.) and atmosphere (e.g., air plus 5% CO₂).

[1401] In one embodiment, the cells are expanded in an appropriate media (e.g., media described herein) that includes one or more interleukin that result in at least a 200-fold (e.g., 200-fold, 250-fold, 300-fold, 350-fold) increase in cells over a 14 day expansion period, e.g., as measured by a method described herein such as flow cytometry. In one embodiment, the cells are expanded in the presence of IL-15 and/or IL-7 (e.g., IL-15 and IL-7).

[1402] In embodiments, methods described herein, manufacturing methods for cells of the invention, e.g., cells comprising or which at any time comprised or will comprise a gRNA molecule as described herein, e.g., said cells expressing a CAR, comprise removing T regulatory cells, e.g., CD25+ T cells, from a cell population, e.g., using an anti-CD25 antibody, or fragment thereof, or a CD25-binding ligand, IL-2. Methods of removing T regulatory cells, e.g., CD25+ T cells, from a cell population are described herein. In embodiments, the methods, e.g., manufacturing methods, further comprise contacting a cell population (e.g., a cell population in which T regulatory cells, such as CD25+ T cells, have been depleted; or a cell population that has previously contacted an anti-CD25 antibody, fragment thereof, or CD25-binding ligand) with IL-15 and/or IL-7. For example, the cell population (e.g., that has previously contacted an anti-CD25 antibody, fragment thereof, or CD25-binding ligand) is expanded in the presence of IL-15 and/or IL-7.

[1403] In some embodiments the cells of the invention, e.g., cells comprising or which at any time comprised or will comprise a gRNA molecule as described herein, e.g., said cells expressing a CAR as described herein, are contacted with a composition comprising a interleukin-15 (IL-15) polypeptide, a interleukin-15 receptor alpha (IL-15Ra) polypeptide, or a combination of both a IL-15 polypeptide and a IL-15Ra polypeptide e.g., hetIL-15, during the manufacturing of the CAR-expressing cell, e.g., ex vivo. In embodiments, a cell described herein is contacted with a composition comprising a IL-15 polypeptide during the manufacturing of the cell, e.g., ex vivo. In embodiments, a cell described herein is contacted with a composition comprising a combination of both a IL-15 polypeptide and a IL-15 Ra polypeptide during the manufacturing of the CAR-expressing cell, e.g., ex vivo. In embodiments, a cell described herein is contacted with a composition comprising hetIL-15 during the manufacturing of the CAR-expressing cell, e.g., ex vivo.

[1404] In one embodiment the cells of the invention, e.g., cells comprising or which at any time comprised or will comprise a gRNA molecule as described herein, e.g., said cells expressing a CAR as described herein, is contacted with a composition comprising hetIL-15 during ex vivo expansion. In an embodiment, the cell described herein is contacted with a composition comprising an IL-15 polypeptide during ex vivo expansion. In an embodiment, the CAR-expressing cell described herein is contacted with a composition comprising both an IL-15 polypeptide and an IL-15Ra polypeptide during ex vivo expansion. In one embodiment the contacting results in the survival and proliferation of a lymphocyte subpopulation, e.g., CD8+ T cells.

[1405] T cells that have been exposed to varied stimulation times may exhibit different characteristics. For example, typical blood or apheresed peripheral blood mononuclear cell products have a helper T cell population (TH, CD4+) that is greater than the cytotoxic or suppressor T cell population (TC, CD8+). Ex vivo expansion of T cells by stimulating CD3 and CD28 receptors produces a population of T cells that prior to about days 8-9 consists predominately of TH cells, while after about days 8-9, the population of T cells comprises an increasingly greater population of TC cells. Accordingly, depending on the purpose of treatment, infusing a subject with a T cell population comprising predominately of TH cells may be advantageous. Similarly, if an antigen-specific subset of TC cells has been isolated it may be beneficial to expand this subset to a greater degree.

[1406] Further, in addition to CD4 and CD8 markers, other phenotypic markers vary significantly, but in large part, reproducibly during the course of the cell expansion process. Thus, such reproducibility enables the ability to tailor an activated T cell product for specific purposes.

[1407] Once a cell of the invention has been engineered to express a CAR described herein is constructed, various assays can be used to evaluate the activity of the molecule, such as but not limited to, the ability to expand T cells following antigen stimulation, sustain T cell expansion in the absence of re-stimulation, and anti-cancer activities in appropriate in vitro and animal models. Assays to evaluate the effects of a cars of the present invention are described in further detail below

[1408] Western blot analysis of CAR expression in primary T cells can be used to detect the presence of monomers and dimers. See, e.g., Milone et al., Molecular Therapy 17(8): 1453-1464 (2009). Very briefly, T cells (1:1 mixture of CD4+ and CD8+ T cells) expressing the CARs are expanded in vitro for more than 10 days followed by lysis and SDS-PAGE under reducing conditions. CARs containing the full length TCR-ζ cytoplasmic domain and the endogenous TCR-ζ chain are detected by western blotting using an antibody to the TCR-ζ chain. The same T cell subsets are used for SDS-PAGE analysis under non-reducing conditions to permit evaluation of covalent dimer formation.

[1409] In vitro expansion of CAR T cells following antigen stimulation can be measured by flow cytometry. For example, a mixture of CD4+ and CD8+ T cells are stimulated with αCD3/αCD28 aAPCs followed by transduction with lentiviral vectors expressing GFP under the control of the promoters to be analyzed. Exemplary promoters include the CMV IE gene, EF-1a, ubiquitin C, or phosphoglycerokinase (PGK) promoters. GFP fluorescence is evaluated on day 6 of culture in the CD4+ and/or CD8+ T cell subsets by flow cytometry. See, e.g., Milone et al., Molecular Therapy 17(8): 1453-1464 (2009). Alternatively, a mixture of CD4⁺ and CD8⁺ T cells are stimulated with αCD3/αCD28 coated magnetic beads on day 0, and transduced with CAR on day 1 using a bicistronic lentiviral vector expressing CAR along with eGFP using a 2A ribosomal skipping sequence. Cultures are re-stimulated with either a cancer associated antigen as described herein⁺ K562 cells (K562 expressing a cancer associated antigen as described herein), wild-type K562 cells (K562 wild type) or K562 cells expressing hCD32 and 4-1BBL in the presence of antiCD3 and anti-CD28 antibody (K562-BBL-3/28) following washing. Exogenous IL-2 is added to the cultures every other day at 100 IU/ml. GFP⁺ T cells are enumerated by flow cytometry using bead-based counting. See, e.g., Milone et al., Molecular Therapy 17(8): 1453-1464 (2009).

[1410] Sustained CAR⁺ T cell expansion in the absence of re-stimulation can also be measured. See, e.g., Milone et al., Molecular Therapy 17(8): 1453-1464 (2009). Briefly, mean T cell volume (fl) is measured on day 8 of culture using a Coulter Multisizer III particle counter, a Nexcelom Cellometer Vision or Millipore Scepter, following stimulation with αCD3/αCD28 coated magnetic beads on day 0, and transduction with the indicated CAR on day 1.

[1411] Animal models can also be used to measure a CART activity. For example, xenograft model using human a cancer associated antigen described herein-specific CAR T cells to treat a primary human pre-B ALL in immunodeficient mice can be used. See, e.g., Milone et al., Molecular Therapy 17(8): 1453-1464 (2009). Very briefly, after establishment of ALL, mice are randomized as to treatment groups. Different numbers of a cancer associated antigen-specific CAR engineered T cells are coinjected at a 1:1 ratio into NOD-SCID-γ^{-/-} mice bearing B-ALL. The number of copies of a cancer associated antigen-specific CAR vector in spleen DNA from mice is evaluated at various times following T cell injection. Animals are assessed for leukemia at weekly intervals. Peripheral blood a cancer associate antigen as described herein⁺ B-ALL blast cell counts are measured in mice that are injected with a cancer associated antigen described herein-(CAR T cells or mock-transduced T cells. Survival curves for the groups are compared using the log-rank test. In addition, absolute peripheral blood CD4⁺ and CD8⁺ T cell counts 4 weeks following T cell injection in NOD-SCID-γ^{-/-} mice can also be analyzed. Mice are injected with leukemic cells and 3 weeks later are injected with T cells engineered to express CAR by a bicistronic lentiviral vector that encodes the CAR linked to eGFP. T cells are normalized to 45-50% input GFP⁺ T cells by mixing with mock-transduced cells prior to injection, and confirmed by flow cytometry. Animals are assessed for leukemia at 1-week intervals. Survival curves for the CAR T cell groups are compared using the log-rank test.

[1412] Dose dependent CAR treatment response can be evaluated. See, e.g., Milone et al., Molecular Therapy 17(8): 1453-1464 (2009). For example, peripheral blood is obtained 35-70 days after establishing leukemia in mice injected on day 21 with CAR T cells, an equivalent number of mock-transduced T cells, or no T cells. Mice from each group are randomly bled for determination of peripheral blood a cancer associate antigen as described herein⁺ ALL blast counts and then killed on days 35 and 49. The remaining animals are evaluated on days 57 and 70.

[1413] Assessment of cell proliferation and cytokine production has been previously described, e.g., at Milone et al., Molecular Therapy 17(8): 1453-1464 (2009). Briefly, assessment of CAR-mediated proliferation is performed in microtiter plates by mixing washed T cells with K562 cells expressing a cancer associated antigen described herein (K19) or CD32 and CD137 (KT32-BBL) for a final T-cell:K562 ratio of 2:1. K562 cells are irradiated with gamma-radiation prior to use. Anti-CD3 (clone OKT3) and anti-CD28 (clone 9.3) monoclonal antibodies are added to cultures with KT32-BBL cells to serve as a positive control for stimulating T-cell proliferation since these signals support long-term CD8⁺ T cell expansion ex vivo. T cells are enumerated in cultures using CountBright™ fluorescent beads (Invitrogen, Carlsbad, CA) and flow cytometry as described by the manufacturer. CAR⁺ T cells are identified by GFP expression using T cells that are engineered with eGFP-2A linked CAR-expressing lentiviral vectors. For CAR+ T cells not expressing GFP, the CAR+ T cells are detected with biotinylated recombinant a cancer associate antigen as described herein protein and a secondary avidin-PE conjugate. CD4+ and CD8+ expression on T cells are also simultaneously detected with specific monoclonal antibodies (BD Biosciences). Cytokine measurements are performed on supernatants collected 24 hours following re-stimulation using the human TH1/TH2 cytokine cytometric bead array kit (BD Biosciences, San Diego, CA) according the manufacturer's instructions. Fluorescence is assessed using a FACScalibur flow cytometer, and data is analyzed according to the manufacturer's instructions.

[1414] Cytotoxicity can be assessed by a standard 51Cr-release assay. See, e.g., Milone et al., Molecular Therapy 17(8): 1453-1464 (2009). Briefly, target cells (K562 lines and primary pro-B-ALL cells) are loaded with 51Cr (as NaCrO4, New England Nuclear, Boston, MA) at 37° C. for 2 hours with frequent agitation, washed twice in complete RPMI and plated into microtiter plates. Effector T cells are mixed with target cells in the wells in complete RPMI at varying ratios of effector cell:target cell (E:T). Additional wells containing media only (spontaneous release, SR) or a 1% solution of triton-X 100 detergent (total release, TR) are also prepared. After 4 hours of incubation at 37° C., supernatant from each well is harvested. Released 51Cr is then measured using a gamma particle counter (Packard Instrument Co., Waltham, MA). Each condition is performed in at least triplicate, and the percentage of lysis is calculated using the formula: % Lysis=(ER−SR)/(TR−SR), where ER represents the average 51Cr released for each experimental condition.

[1415] Imaging technologies can be used to evaluate specific trafficking and proliferation of CARs in tumor-bearing animal models. Such assays have been described, for example, in Barrett et al., Human Gene Therapy 22:1575-1586 (2011). Briefly, NOD-SCID-γ^{-/-} (NSG) mice are injected IV with Nalm-6 cells followed 7 days later with T cells 4 hour after electroporation with the CAR constructs. The T cells are stably transfected with a lentiviral construct to express firefly luciferase, and mice are imaged for bioluminescence. Alternatively, therapeutic efficacy and specificity of a single injection of CAR⁺ T cells in Nalm-6 xenograft model can be measured as the following: NSG mice are injected with Nalm-6 transduced to stably express firefly luciferase, followed by a single tail-vein injection of T cells electroporated with cars of the present invention 7 days later. Animals are imaged at various time points post injection. For example, photon-density heat maps of firefly luciferase positive leukemia in representative mice at day 5 (2 days before treatment) and day 8 (24 hr post CAR⁺ PBLs) can be generated.

[1416] Other assays, including those described in the Example section herein as well as those that are known in the art can also be used to evaluate the cells and cells expressing CARs described herein.

### Delivery Timing

[1417] In an embodiment, one or more nucleic acid molecules (e.g., DNA molecules) other than the components of a Cas system, e.g., the Cas9 molecule component and/or the gRNA molecule component described herein, are delivered. In an embodiment, the nucleic acid molecule is delivered at the same time as one or more of the components of the Cas system are delivered. In an embodiment, the nucleic acid molecule is delivered before or after (e.g., less than about 30 minutes, 1 hour, 2 hours, 3 hours, 6 hours, 9 hours, 12 hours, 1 day, 2 days, 3 days, 1 week, 2 weeks, or 4 weeks) one or more of the components of the Cas system are delivered. In an embodiment, the nucleic acid molecule is delivered by a different means than one or more of the components of the Cas system, e.g., the Cas9 molecule component and/or the gRNA molecule component, are delivered. The nucleic acid molecule can be delivered by any of the delivery methods described herein. For example, the nucleic acid molecule can be delivered by a viral vector, e.g., an integration-deficient lentivirus, and the Cas9 molecule component and/or the gRNA molecule component can be delivered by electroporation, e.g., such that the toxicity caused by nucleic acids (e.g., DNAs) can be reduced. In an embodiment, the nucleic acid molecule encodes a therapeutic protein, e.g., a protein described herein. In an embodiment, the nucleic acid molecule encodes an RNA molecule, e.g, an RNA molecule described herein.

### Bi-Modal or Differential Delivery of Components

[1418] Separate delivery of the components of a Cas system, e.g., the Cas9 molecule component and the gRNA molecule component, and more particularly, delivery of the components by differing modes, can enhance performance, e.g., by improving tissue specificity and safety. In an embodiment, the Cas9 molecule and the gRNA molecule are delivered by different modes, or as sometimes referred to herein as differential modes. Different or differential modes, as used herein, refer modes of delivery, that confer different pharmacodynamic or pharmacokinetic properties on the subject component molecule, e.g., a Cas9 molecule, gRNA molecule, template nucleic acid, or payload. E.g., the modes of delivery can result in different tissue distribution, different half-life, or different temporal distribution, e.g., in a selected compartment, tissue, or organ.

[1419] Some modes of delivery, e.g., delivery by a nucleic acid vector that persists in a cell, or in progeny of a cell, e.g., by autonomous replication or insertion into cellular nucleic acid, result in more persistent expression of and presence of a component. Examples include viral, e.g., adeno associated virus or lentivirus, delivery.

[1420] By way of example, the components, e.g., a Cas9 molecule and a gRNA molecule, can be delivered by modes that differ in terms of resulting half life or persistent of the delivered component the body, or in a particular compartment, tissue or organ. In an embodiment, a gRNA molecule can be delivered by such modes. The Cas9 molecule component can be delivered by a mode which results in less persistence or less exposure of its to the body or a particular compartment or tissue or organ.

[1421] More generally, in an embodiment, a first mode of delivery is used to deliver a first component and a second mode of delivery is used to deliver a second component. The first mode of delivery confers a first pharmacodynamic or pharmacokinetic property. The first pharmacodynamic property can be, e.g., distribution, persistence, or exposure, of the component, or of a nucleic acid that encodes the component, in the body, a compartment, tissue or organ. The second mode of delivery confers a second pharmacodynamic or pharmacokinetic property. The second pharmacodynamic property can be, e.g., distribution, persistence, or exposure, of the component, or of a nucleic acid that encodes the component, in the body, a compartment, tissue or organ.

[1422] In an embodiment, the first pharmacodynamic or pharmacokinetic property, e.g., distribution, persistence or exposure, is more limited than the second pharmacodynamic or pharmacokinetic property.

[1423] In an embodiment, the first mode of delivery is selected to optimize, e.g., minimize, a pharmacodynamic or pharmacokinetic property, e.g., distribution, persistence or exposure.

[1424] In an embodiment, the second mode of delivery is selected to optimize, e.g., maximize, a pharmacodynamic or pharmcokinetic property, e.g., distribution, persistence or exposure.

[1425] In an embodiment, the first mode of delivery comprises the use of a relatively persistent element, e.g., a nucleic acid, e.g., a plasmid or viral vector, e.g., an AAV or lentivirus. As such vectors are relatively persistent product transcribed from them would be relatively persistent.

[1426] In an embodiment, the second mode of delivery comprises a relatively transient element, e.g., an RNA or protein.

[1427] In an embodiment, the first component comprises gRNA, and the delivery mode is relatively persistent, e.g., the gRNA is transcribed from a plasmid or viral vector, e.g., an AAV or lentivirus. Transcription of these genes would be of little physiological consequence because the genes do not encode for a protein product, and the gR As are incapable of acting in isolation. The second component, a Cas9 molecule, is delivered in a transient manner, for example as mRNA or as protein, ensuring that the full Cas9 molecule/gRNA molecule complex is only present and active for a short period of time.

[1428] Furthermore, the components can be delivered in different molecular form or with different delivery vectors that complement one another to enhance safety and tissue specificity.

[1429] Use of differential delivery modes can enhance performance, safety and efficacy. For example, the likelihood of an eventual off-target modification can be reduced. Delivery of immunogenic components, e.g., Cas9 molecules, by less persistent modes can reduce immunogenicity, as peptides from the bacterially-derived Cas enzyme are displayed on the surface of the cell by MHC molecules. A two-part delivery system can alleviate these drawbacks.

[1430] Differential delivery modes can be used to deliver components to different, but overlapping target regions. The formation active complex is minimized outside the overlap of the target regions. Thus, in an embodiment, a first component, e.g., a gRNA molecule is delivered by a first delivery mode that results in a first spatial, e.g., tissue, distribution. A second component, e.g., a Cas9 molecule is delivered by a second delivery mode that results in a second spatial, e.g., tissue, distribution. In an embodiment, the first mode comprises a first element selected from a liposome, nanoparticle, e.g., polymeric nanoparticle, and a nucleic acid, e.g., viral vector. The second mode comprises a second element selected from the group. In an embodiment, the first mode of delivery comprises a first targeting element, e.g., a cell specific receptor or an antibody, and the second mode of delivery does not include that element. In an embodiment, the second mode of delivery comprises a second targeting element, e.g., a second cell specific receptor or second antibody.

[1431] When the Cas9 molecule is delivered in a virus delivery vector, a liposome, or polymeric nanoparticle, there is the potential for delivery to and therapeutic activity in multiple tissues, when it may be desirable to only target a single tissue. A two-part delivery system can resolve this challenge and enhance tissue specificity. If the gRNA molecule and the Cas9 molecule are packaged in separated delivery vehicles with distinct but overlapping tissue tropism, the fully functional complex is only be formed in the tissue that is targeted by both vectors.

[1432] In one aspect, the delivery is accomplished ex vivo.

### XIII. Modified Nucleosides, Nucleotides, and Nucleic Acids

[1433] Modified nucleosides and modified nucleotides can be present in nucleic acids, e.g., particularly gRNA, but also other forms of RNA, e.g., mRNA, RNAi, or siRNA. As described herein “nucleoside” is defined as a compound containing a five-carbon sugar molecule (a pentose or ribose) or derivative thereof, and an organic base, purine or pyrimidine, or a derivative thereof. As described herein, “nucleotide” is defined as a nucleoside further comprising a phosphate group.

[1434] Modified nucleosides and nucleotides can include one or more of:
[1435] (i) alteration, e.g., replacement, of one or both of the non-linking phosphate oxygens and/or of one or more of the linking phosphate oxygens in the phosphodiester backbone linkage;
[1436] (ii) alteration, e.g., replacement, of a constituent of the ribose sugar, e.g., of the 2′ hydroxyl on the ribose sugar;
[1437] (iii) wholesale replacement of the phosphate moiety with “dephospho” linkers;
[1438] (iv) modification or replacement of a naturally occurring nucleobase, including with a non-canonical nucleobase;
[1439] (v) replacement or modification of the ribose-phosphate backbone;
[1440] (vi) modification of the 3′ end or 5′ end of the oligonucleotide, e.g., removal, modification or replacement of a terminal phosphate group or conjugation of a moiety, cap or linker; and
[1441] (vii) modification or replacement of the sugar.

[1442] The modifications listed above can be combined to provide modified nucleosides and nucleotides that can have two, three, four, or more modifications. For example, a modified nucleoside or nucleotide can have a modified sugar and a modified nucleobase. In an embodiment, every base of a gRNA is modified, e.g., all bases have a modified phosphate group, e.g., all are phosphorothioate groups. In an embodiment, all, or substantially all, of the phosphate groups of a unimolecular or modular gRNA molecule are replaced with phosphorothioate groups.

[1443] In an embodiment, modified nucleotides, e.g., nucleotides having modifications as described herein, can be incorporated into a nucleic acid, e.g., a “modified nucleic acid.” In some embodiments, the modified nucleic acids comprise one, two, three or more modified nucleotides. In some embodiments, at least 5% (e.g., at least about 5%, at least about 10%, at least about 15%, at least about 20%, at least about 25%, at least about 30%, at least about 35%, at least about 40%, at least about 45%, at least about 50%, at least about 55%, at least about 60%, at least about 65%, at least about 70%, at least about 75%, at least about 80%, at least about 85%, at least about 90%, at least about 95%, or about 100%) of the positions in a modified nucleic acid are a modified nucleotides.

[1444] Unmodified nucleic acids can be prone to degradation by, e.g., cellular nucleases. For example, nucleases can hydrolyze nucleic acid phosphodiester bonds. Accordingly, in one aspect the modified nucleic acids described herein can contain one or more modified nucleosides or nucleotides, e.g., to introduce stability toward nucleases.

[1445] In some embodiments, the modified nucleosides, modified nucleotides, and modified nucleic acids described herein can exhibit a reduced innate immune response when introduced into a population of cells, both in vivo and ex vivo. The term “innate immune response” includes a cellular response to exogenous nucleic acids, including single stranded nucleic acids, generally of viral or bacterial origin, which involves the induction of cytokine expression and release, particularly the interferons, and cell death. In some embodiments, the modified nucleosides, modified nucleotides, and modified nucleic acids described herein can disrupt binding of a major groove interacting partner with the nucleic acid. In some embodiments, the modified nucleosides, modified nucleotides, and modified nucleic acids described herein can exhibit a reduced innate immune response when introduced into a population of cells, both in vivo and ex vivo, and also disrupt binding of a major groove interacting partner with the nucleic acid.

### Definitions of Chemical Groups

[1446] As used herein, “alkyl” is meant to refer to a saturated hydrocarbon group which is straight-chained or branched. Example alkyl groups include methyl (Me), ethyl (Et), propyl (e.g., n-propyl and isopropyl), butyl (e.g., n-butyl, isobutyl, t-butyl), pentyl (e.g., n-pentyl, isopentyl, neopentyl), and the like. An alkyl group can contain from 1 to about 20, from 2 to about 20, from 1 to about 12, from 1 to about 8, from 1 to about 6, from 1 to about 4, or from 1 to about 3 carbon atoms.

[1447] As used herein, “aryl” refers to monocyclic or polycyclic (e.g., having 2, 3 or 4 fused rings) aromatic hydrocarbons such as, for example, phenyl, naphthyl, anthracenyl, phenanthrenyl, indanyl, indenyl, and the like. In some embodiments, aryl groups have from 6 to about 20 carbon atoms.

[1448] As used herein, “alkenyl” refers to an aliphatic group containing at least one double bond. As used herein, “alkynyl” refers to a straight or branched hydrocarbon chain containing 2-12 carbon atoms and characterized in having one or more triple bonds. Examples of alkynyl groups include, but are not limited to, ethynyl, propargyl, and 3-hexynyl.

[1449] As used herein, “arylalkyl” or “aralkyl” refers to an alkyl moiety in which an alkyl hydrogen atom is replaced by an aryl group. Aralkyl includes groups in which more than one hydrogen atom has been replaced by an aryl group. Examples of “arylalkyl” or “aralkyl” include benzyl, 2-phenylethyl, 3-phenylpropyl, 9-fluorenyl, benzhydryl, and trityl groups.

[1450] As used herein, “cycloalkyl” refers to a cyclic, bicyclic, tricyclic, or polycyclic non-aromatic hydrocarbon groups having 3 to 12 carbons. Examples of cycloalkyl moieties include, but are not limited to, cyclopropyl, cyclopentyl, and cyclohexyl.

[1451] As used herein, “heterocyclyl” refers to a monovalent radical of a heterocyclic ring system. Representative heterocyclyls include, without limitation, tetrahydrofuranyl, tetrahydrothienyl, pyrrolidinyl, pyrrolidonyl, piperidinyl, pyrrolinyl, piperazinyl, dioxanyl, dioxolanyl, diazepinyl, oxazepinyl, thiazepinyl, and morpholinyl.

[1452] As used herein, “heteroaryl” refers to a monovalent radical of a heteroaromatic ring system. Examples of heteroaryl moieties include, but are not limited to, imidazolyl, oxazolyl, thiazolyl, triazolyl, pyrrolyl, furanyl, indolyl, thiophenyl pyrazolyl, pyridinyl, pyrazinyl, pyridazinyl, pyrimidinyl, indolizinyl, purinyl, naphthyridinyl, quinolyl, and pteridinyl.

### Phosphate Backbone Modifications

### The Phosphate Group

[1453] In some embodiments, the phosphate group of a modified nucleotide can be modified by replacing one or more of the oxygens with a different substituent. Further, the modified nucleotide, e.g., modified nucleotide present in a modified nucleic acid, can include the wholesale replacement of an unmodified phosphate moiety with a modified phosphate as described herein. In some embodiments, the modification of the phosphate backbone can include alterations that result in either an uncharged linker or a charged linker with unsymmetrical charge distribution.

[1454] Examples of modified phosphate groups include, phosphorothioate, phosphoroselenates, borano phosphates, borano phosphate esters, hydrogen phosphonates, phosphoroamidates, alkyl or aryl phosphonates and phosphotriesters. In some embodiments, one of the non-bridging phosphate oxygen atoms in the phosphate backbone moiety can be replaced by any of the following groups: sulfur (S), selenium (Se), BR₃ (wherein R can be, e.g., hydrogen, alkyl, or aryl), C (e.g., an alkyl group, an aryl group, and the like), H, NR₂ (wherein R can be, e.g., hydrogen, alkyl, or aryl), or OR (wherein R can be, e.g., alkyl or aryl). The phosphorous atom in an unmodified phosphate group is achiral. However, replacement of one of the non-bridging oxygens with one of the above atoms or groups of atoms can render the phosphorous atom chiral; that is to say that a phosphorous atom in a phosphate group modified in this way is a stereogenic center. The stereogenic phosphorous atom can possess either the “R” configuration (herein Rp) or the “S” configuration (herein Sp).

[1455] Phosphorodithioates have both non-bridging oxygens replaced by sulfur. The phosphorus center in the phosphorodithioates is achiral which precludes the formation of oligoribonucleotide diastereomers. In some embodiments, modifications to one or both non-bridging oxygens can also include the replacement of the non-bridging oxygens with a group independently selected from S, Se, B, C, H, N, and OR (R can be, e.g., alkyl or aryl).

[1456] The phosphate linker can also be modified by replacement of a bridging oxygen, (i.e., the oxygen that links the phosphate to the nucleoside), with nitrogen (bridged phosphoroamidates), sulfur (bridged phosphorothioates) and carbon (bridged methylenephosphonates). The replacement can occur at either linking oxygen or at both of the linking oxygens.

### Replacement of the Phosphate Group

[1457] The phosphate group can be replaced by non-phosphorus containing connectors. In some embodiments, the charge phosphate group can be replaced by a neutral moiety.

[1458] Examples of moieties which can replace the phosphate group can include, without limitation, e.g., methyl phosphonate, hydroxylamino, siloxane, carbonate, carboxymethyl, carbamate, amide, thioether, ethylene oxide linker, sulfonate, sulfonamide, thioformacetal, formacetal, oxime, methyleneimino, methylenemethylimino, methylenehydrazono, methylenedimethylhydrazo and methyleneoxymethylimino.

### Replacement of the Ribophosphate Backbone

[1459] Scaffolds that can mimic nucleic acids can also be constructed wherein the phosphate linker and ribose sugar are replaced by nuclease resistant nucleoside or nucleotide surrogates. In some embodiments, the nucleobases can be tethered by a surrogate backbone. Examples can include, without limitation, the morpholino, cyclobutyl, pyrrolidine and peptide nucleic acid (PNA) nucleoside surrogates.

### Sugar Modifications

[1460] The modified nucleosides and modified nucleotides can include one or more modifications to the sugar group. For example, the 2′ hydroxyl group (OH) can be modified or replaced with a number of different “oxy” or “deoxy” substituents. In some embodiments, modifications to the 2′ hydroxyl group can enhance the stability of the nucleic acid since the hydroxyl can no longer be deprotonated to form a 2′-alkoxide ion. The 2′-alkoxide can catalyze degradation by intramolecular nucleophilic attack on the linker phosphorus atom.

[1461] Examples of “oxy”-2′ hydroxyl group modifications can include alkoxy or aryloxy (OR, wherein “R” can be, e.g., alkyl, cycloalkyl, aryl, aralkyl, heteroaryl or a sugar); polyethyleneglycols (PEG), O(CH₂CH₂O)ₙCH2CH₂OR wherein R can be, e.g., H or optionally substituted alkyl, and n can be an integer from 0 to 20 (e.g., from 0 to 4, from 0 to 8, from 0 to 10, from 0 to 16, from 1 to 4, from 1 to 8, from 1 to 10, from 1 to 16, from 1 to 20, from 2 to 4, from 2 to 8, from 2 to 10, from 2 to 16, from 2 to 20, from 4 to 8, from 4 to 10, from 4 to 16, and from 4 to 20). In some embodiments, the “oxy”-2′ hydroxyl group modification can include “locked” nucleic acids (LNA) in which the 2′ hydroxyl can be connected, e.g., by a Ci-₆ alkylene or Cj-6 heteroalkylene bridge, to the 4′ carbon of the same ribose sugar, where exemplary bridges can include methylene, propylene, ether, or amino bridges; O-amino (wherein amino can be, e.g., NH₂; alkylamino, dialkylamino, heterocyclyl, arylamino, diarylamino, heteroarylamino, or diheteroarylamino, ethylenediamine, or polyamino) and aminoalkoxy, O(CH₂)ₙ-amino, (wherein amino can be, e.g., NH₂; alkylamino, dialkylamino, heterocyclyl, arylamino, diarylamino, heteroarylamino, or diheteroarylamino, ethylenediamine, or polyamino). In some embodiments, the “oxy”-2′ hydroxyl group modification can include the methoxyethyl group (MOE), (OCH₂CH₂OCH₃, e.g., a PEG derivative).

[1462] “Deoxy” modifications can include hydrogen (i.e. deoxyribose sugars, e.g., at the overhang portions of partially ds RNA); halo (e.g., bromo, chloro, fluoro, or iodo); amino (wherein amino can be, e.g., NH₂; alkylamino, dialkylamino, heterocyclyl, arylamino, diarylamino, heteroarylamino, diheteroarylamino, or amino acid); NH(CH₂CH₂NH)˜CH2CH₂— amino (wherein amino can be, e.g., as described herein), —NHC(O)R (wherein R can be, e.g., alkyl, cycloalkyl, aryl, aralkyl, heteroaryl or sugar), cyano; mercapto; alkyl-thio-alkyl; thioalkoxy; and alkyl, cycloalkyl, aryl, alkenyl and alkynyl, which may be optionally substituted with e.g., an amino as described herein.

[1463] The sugar group can also contain one or more carbons that possess the opposite stereochemical configuration than that of the corresponding carbon in ribose. Thus, a modified nucleic acid can include nucleotides containing e.g., arabinose, as the sugar. The nucleotide “monomer” can have an alpha linkage at the F position on the sugar, e.g., alpha-nucleosides. The modified nucleic acids can also include “abasic” sugars, which lack a nucleobase at C−. These abasic sugars can also be further modified at one or more of the constituent sugar atoms. The modified nucleic acids can also include one or more sugars that are in the L form, e.g. L-nucleosides.

[1464] Generally, RNA includes the sugar group ribose, which is a 5-membered ring having an oxygen. Exemplary modified nucleosides and modified nucleotides can include, without limitation, replacement of the oxygen in ribose (e.g., with sulfur (S), selenium (Se), or alkylene, such as, e.g., methylene or ethylene); addition of a double bond (e.g., to replace ribose with cyclopentenyl or cyclohexenyl); ring contraction of ribose (e.g., to form a 4-membered ring of cyclobutane or oxetane); ring expansion of ribose (e.g., to form a 6- or 7-membered ring having an additional carbon or heteroatom, such as for example, anhydrohexitol, altritol, mannitol, cyclohexanyl, cyclohexenyl, and morpholino that also has a phosphoramidate backbone). In some embodiments, the modified nucleotides can include multicyclic forms (e.g., tricyclo; and “unlocked” forms, such as glycol nucleic acid (GNA) (e.g., R-GNA or S-GNA, where ribose is replaced by glycol units attached to phosphodiester bonds), threose nucleic acid (TNA, where ribose is replaced with a-L-threofuranosyl-(3′→2′)).

### Modifications on the Nucleobase

[1465] The modified nucleosides and modified nucleotides described herein, which can be incorporated into a modified nucleic acid, can include a modified nucleobase. Examples of nucleobases include, but are not limited to, adenine (A), guanine (G), cytosine (C), and uracil (U). These nucleobases can be modified or wholly replaced to provide modified nucleosides and modified nucleotides that can be incorporated into modified nucleic acids. The nucleobase of the nucleotide can be independently selected from a purine, a pyrimidine, a purine or pyrimidine analog. In some embodiments, the nucleobase can include, for example, naturally-occurring and synthetic derivatives of a base.

### Uracil

[1466] In some embodiments, the modified nucleobase is a modified uracil. Exemplary nucleobases and nucleosides having a modified uracil include without limitation pseudouridine (ψ), pyridin-4-one ribonucleoside, 5-aza-uridine, 6-aza-uridine, 2-thio-5-aza-uridine, 2-thio-uridine (s2U), 4-thio-uridine (s4U), 4-thio-pseudouridine, 2-thio-pseudouridine, 5-hydroxy-uridine (ho⁵U), 5-aminoallyl-uridine, 5-halo-uridine (e.g., 5-iodo-uridine or 5-bromo-uridine), 3-methyl-uridine (m³U), 5-methoxy-uridine (mo⁵U), uridine 5-oxyacetic acid (cmo⁵U), uridine 5-oxyacetic acid methyl ester (mcmo\hat{ }U), 5-carboxymethyl-uridine (cm⁵U), 1-carboxymethyl-pseudouridine, 5-carboxyhydroxymethyl-uridine (chm⁵U), 5-carboxyhydroxymethyl-uridine methyl ester (mchm⁵U), 5-methoxycarbonylmethyl-uridine (mcm⁵U), 5-methoxycarbonylmethyl-2-thio-uridine (mcm⁵s2U), 5-aminomethyl-2-thio-uridine (nm⁵s2U), 5-methylaminomethyl-uridine (mnm⁵U), 5-methylaminomethyl-2-thio-uridine (mnm⁵s2U), 5-methylaminomethyl-2-seleno-uridine (mnm⁵se²U), 5-carbamoylmethyl-uridine (ncm⁵U), 5-carboxymethylaminomethyl-uridine (cmnm⁵U), 5-carboxymethylaminomethyl-2-thio-uridine (cmnm\s2U), 5-propynyl-uridine, 1-propynyl-pseudouridine, 5-taurinomethyl-uridine (xcm⁵U), 1-taurinomethyl-pseudouridine, 5-taurinomethyl-2-thio-uridine(Tm⁵s2U), 1-taurinomethyl-4-thio-pseudouridine, 5-methyl-uridine (m⁵U, i.e., having the nucleobase deoxythymine), 1-methyl-pseudouridine (ιτι′ψ). 5-methyl-2-thio-uridine (m⁵s2U), 1-methyl-4-thio-pseudouridine (m′ \|/), 4-thio-1-methyl-pseudouridine, 3-methyl-pseudouridine (m′V), 2-thio-1-methyl-pseudouridine, 1-methyl-1-deaza-pseudouridine, 2-thio-1-methyl-1-deaza-pseudouridine, dihydroundine (D), dihydropseudoundine, 5,6-dihydrouridine, 5-methyl-dihydrouridine (m⁵D), 2-thio-dihydrouridine, 2-thio-dihydropseudouridine, 2-methoxy-uridine, 2-methoxy-4-thio-uridine, 4-methoxy-pseudouridine, 4-methoxy-2-thio-pseudouridine, N1-methyl-pseudouridine, 3-(3-amino-3-carboxypropyl)uridine (acp³U), 1-methyl-3-(3-amino-3-carboxypropyl pseudouridine 5-(isopentenylaminomethyl)uridine (inm⁵U), 5-(isopentenylaminomethyl)-2-thio-uridine (inm⁵s2U), a-thio-uridine, 2′-O-methyl-uridine (Urn), 5,2′-0-dimethyl-uridine (m⁵Um), 2′-0-methyl-pseudouridine (ψπι), 2-thio-2′-0-methyl-uridine (s2Um), 5-methoxycarbonylmethyl-2′-0-methyl-uridine (mcm ⁵Um), 5-carbamoylmethyl-2′-0-methyl-uridine (ncm ⁵Um), 5-carboxymethylaminomethyl-2′-0-methyl-uridine (cmnm ⁵Um), 3,2′-0-dimethyl-uridine (m³Um), 5-(isopentenylaminomethyl)-2′-0-methyl-uridine (inm ⁵Um), 1-thio-uridine, deoxythymidine, 2′-F-ara-uridine, 2′-F-uridine, 2′-OH-ara-uridine, 5-(2-carbomethoxyvinyl) uridine, 5-[3-(1-E-propenylamino)uridine, pyrazolo[3,4-d]pyrimidines, xanthine, and hypoxanthine.

### Cytosine

[1467] In some embodiments, the modified nucleobase is a modified cytosine. Exemplary nucleobases and nucleosides having a modified cytosine include without limitation 5-aza-cytidine, 6-aza-cytidine, pseudoisocytidine, 3-methyl-cytidine (m³C), N4-acetyl-cytidine (act), 5-formyl-cytidine (f⁵C), N4-methyl-cytidine (m⁴C), 5-methyl-cytidine (m⁵C), 5-halo-cytidine (e.g., 5-iodo-cytidine), 5-hydroxymethyl-cytidine (hm⁵C), 1-methyl-pseudoisocytidine, pyrrolo-cytidine, pyrrolo-pseudoisocytidine, 2-thio-cytidine (s2C), 2-thio-5-methyl-cytidine, 4-thio-pseudoisocytidine, 4-thio-1-methyl-pseudoisocytidine, 4-thio-1-methyl-1-deaza-pseudoisocytidine, 1-methyl-1-deaza-pseudoisocytidine, zebularine, 5-aza-zebularine, 5-methyl-zebularine, 5-aza-2-thio-zebularine, 2-thio-zebularine, 2-methoxy-cytidine, 2-methoxy-5-methyl-cytidine, 4-methoxy-pseudoisocytidine, 4-methoxy-1-methyl-pseudoisocytidine, lysidine (k²C), a-thio-cytidine, 2′-0-methyl-cytidine (Cm), 5,2′-0-dimethyl-cytidine (m⁵Cm), N4-acetyl-2′-0-methyl-cytidine (ac⁴Cm), N4,2′-0-dimethyl-cytidine (m⁴Cm), 5-formyl-2′-0-methyl-cytidine (f ⁵Cm), N4,N4,2′-0-trimethyl-cytidine (m⁴₂Cm), 1-thio-cytidine, 2′-F-ara-cytidine, 2′-F-cytidine, and 2′-OH-ara-cytidine.

### Adenine

[1468] In some embodiments, the modified nucleobase is a modified adenine. Exemplary nucleobases and nucleosides having a modified adenine include without limitation 2-amino-purine, 2,6-diaminopurine, 2-amino-6-halo-purine (e.g., 2-amino-6-chloro-purine), 6-halo-purine (e.g., 6-chloi-purine), 2-amino-6-methyl-purine, 8-azido-adenosine, 7-deaza-adenine, 7-deaza-8-aza-adenine, 7-deaza-2-amino-purine, 7-deaza-8-aza-2-amino-purine, 7-deaza-2,6-diaminopurine, 7-deaza-8-aza-2,6-diaminopurine, 1-methyl-adenosine (m′A), 2-methyl-adenine (m A), N6-methyl-adenosine (m⁶A), 2-methylthio-N6-methyl-adenosine (ms2m⁶A), N6-isopentenyl-adenosine (i⁶A), 2-methylthio-N6-isopentenyl-adenosine (ms²i⁶A), N6-(cis-hydroxyisopentenyl)adenosine (io⁶A), 2-methylthio-N6-(cis-hydroxyisopentenyl)adenosine (ms2io⁶A), N6-glycinylcarbamoyl-adenosine (g⁶A), N6-threonylcarbamoyl-adenosine (t⁶A), N6-methyl-N6-threonylcarbamoyl-adenosine (m⁶t⁶A), 2-methylthio-N6-threonylcarbamoyl-adenosine (ms² g⁶A), N6,N6-dimethyl-adenosine (m₆²A), N6-hydroxynorvalylcarbamoyl-adenosine (hn⁶A), 2-methylthio-N6-hydroxynorvalylcarbamoyl-adenosine (ms2 hn⁶A), N6-acetyl-adenosine (ac⁶A), 7-methyl-adenine, 2-methylthio-adenine, 2-methoxy-adenine, a-thio-adenosine, 2′-O-methyl-adenosine (Am), N⁶,2′-O-dimethyl-adenosine (m′Am), N⁶-Methyl-2′-deoxyadenosine, N6,N6,2′-O-trimethyl-adenosine (m⁶₂Am), 1,2′-0-dimethyl-adenosine (m′Am), 2′-0-ribosyladenosine (phosphate) (Ar(p)), 2-amino-N6-methyl-purine, 1-thio-adenosine, 8-azido-adenosine, 2′-F-ara-adenosine, 2′-F-adenosine, 2′-OH-ara-adenosine, and N6-(19-amino-pentaoxanonadecyl)-adenosine.

### Guanine

[1469] In some embodiments, the modified nucleobase is a modified guanine. Exemplary nucleobases and nucleosides having a modified guanine include without limitation inosine (I), 1-methyl-inosine (m ′l), wyosine (imG), methylwyosine (mimG), 4-demethyl-wyo″sine (imG-14), isowyosine (imG2), wybutosine (yW), peroxywybutosine (o₂yW), hydroxywybutosine (OHyW), undermodified hydroxywybutosine (OHyW*), 7-deaza-guanosine, queuosine (Q), epoxyqueuosine (oQ), galactosyl-queuosine (galQ), mannosyl-queuosine (manQ), 7-cyano-7-deaza-guanosine (preQ₀), 7-aminomethyl-7-deaza-guanosine (preQi), archaeosine (G⁺), 7-deaza-8-aza-guanosine, 6-thio-guanosine, 6-thio-7-deaza-guanosine, 6-thio-7-deaza-8-aza-guanosine, 7-methyl-guanosine (m⁷G), 6-thio-7-methyl-guanosine, 7-methyl-inosine, 6-methoxy-guanosine, 1-methyl-guanosine (m′G), N2-methyl-guanosine (m²G), N2,N2-dimethyl-guanosine (m²₂G), N2,7-dimethyl-guanosine (m²,7G), N2, N2,7-dimethyl-guanosine (m²,2,7G), 8-oxo-guanosine, 7-methyl-8-oxo-guanosine, 1-meth thio-guanosine, N2-methyl-6-thio-guanosine, N2,N2-dimethyl-6-thio-guanosine, a-thio-guanosine, 2′-0-methyl-guanosine (Gm), N2-methyl-2′-0-methyl-guanosine (m % m), N2,N2-dimethyl-2′-0-methyl-guanosine (m²₂Gm), 1-methyl-2′-0-methyl-guanosine (m′Gm), N2,7-dimethyl-2′-0-methyl-guanosine (m²,7Gm), 2′-0-methyl-inosine (Im), 1,2′-0-dimethyl-inosine (m′lm), 0⁶-phenyl-2′-deoxyinosine, 2′-0-ribosylguanosine (phosphate) (Gr(p)), 1-thio-guanosine, 0⁶-methyl-guanosine, 0⁶-Methyl-2′-deoxyguanosine, 2′-F-ara-guanosine, and 2′-F-guanosine.

Modified gRNAs

[1470] In some embodiments, the modified nucleic acids can be modified gRNAs. In some embodiments, gRNAs can be modified at the 3′ end. In this embodiment, the gRNAs can be modified at the 3′ terminal U ribose. For example, the two terminal hydroxyl groups of the U ribose can be oxidized to aldehyde groups and a concomitant opening of the ribose ring to afford a modified nucleoside, wherein U can be an unmodified or modified uridine.

[1471] In another embodiment, the 3′ terminal U can be modified with a 2′ 3′ cyclic phosphate, wherein U can be an unmodified or modified uridine. In some embodiments, the gRNA molecules may contain 3′ nucleotides which can be stabilized against degradation, e.g., by incorporating one or more of the modified nucleotides described herein. In this embodiment, e.g., uridines can be replaced with modified uridines, e.g., 5-(2-amino)propyl uridine, and 5-bromo uridine, or with any of the modified uridines described herein; adenosines and guanosines can be replaced with modified adenosines and guanosines, e.g., with modifications at the 8-position, e.g., 8-bromo guanosine, or with any of the modified adenosines or guanosines described herein. In some embodiments, deaza nucleotides, e.g., 7-deaza-adenosine, can be incorporated into the gRNA. In some embodiments, O- and N-alkylated nucleotides, e.g., N6-methyl adenosine, can be incorporated into the gRNA. In some embodiments, sugar-modified ribonucleotides can be incorporated, e.g., wherein the 2′ OH— group is replaced by a group selected from H, —OR, —R (wherein R can be, e.g., methyl, alkyl, cycloalkyl, aryl, aralkyl, heteroaryl or sugar), halo, —SH, —SR (wherein R can be, e.g., alkyl, cycloalkyl, aryl, aralkyl, heteroaryl or sugar), amino (wherein amino can be, e.g., NH₂; alkylamino, dialkylamino, heterocyclyl, arylamino, diarylamino, heteroarylamino, diheteroarylamino, or amino acid); or cyano (—CN). In some embodiments, the phosphate backbone can be modified as described herein, e.g., with a phosphothioate group. In some embodiments, the nucleotides in the overhang region of the gRNA can each independently be a modified or unmodified nucleotide including, but not limited to 2′-sugar modified, such as, 2-F 2′-0-methyl, thymidine (T), 2′-O-methoxyethyl-5-methyluridine (Teo), 2′-O-methoxyethyladenosine (Aeo), 2′-O-methoxyethyl-5-methylcytidine (m5Ceo), and any combinations thereof.

[1472] In an embodiment, a one or more or all of the nucleotides in single stranded overhang of an RNA molecule, e.g., a gRNA molecule, are deoxynucleotides.

[1473] Candidate Cas molecules, e.g., Cas9 molecules, candidate gRNA molecules, candidate Cas9 molecule/gRNA molecule complexes, and candidate CRISPR systems, can be evaluated by art-known methods or as described herein. For example, exemplary methods for evaluating the endonuclease activity of Cas9 molecule are described, e.g., in Jinek el al., SCIENCE 2012; 337(6096):8 16-821.

### EXAMPLES

### Example 1: Assays

### Guide Selection

[1474] Initial guide selection was performed in silico using a human reference genome and user defined genomic regions of interest (e.g., a gene, an exon of a gene, non-coding regulatory region, etc), for identifying PAMs in the regions of interest. For each identified PAM, analyses were performed and statistics reported. gRNA molecules were further selected and rank-ordered based on a number of criteria known in the art. gRNA molecules were then tested as described herein for cutting efficiency and indel formation as described herein.

[1475] Throughout the Examples, in the experiments below, either sgRNA molecules or dgRNA molecules were used. Unless indicated otherwise, experiments referring to a CRxxxxx identifier for the targeting domain employed a dgRNA format. Unless indicated otherwise, where dgRNA molecules were used, the gRNA includes the following:
[1476] crRNA: [targeting domain]-[SEQ ID NO: 6607]
[1477] tracr (trRNA): SEQ ID NO: 6660.

[1478] Unless indicated otherwise, in experiments employing a sgRNA molecule, the following sequence was used:

[targeting domain]-[SEQ ID NO: 6601]—UUUU

### Transfection of HEK-293_Cas9GFP Cells for Primary Guide Screening

[1479] Transfection of Cas9GFP-expressing HEK293 cells (HEK-293_Cas9GFP) was used for primary screening of target specific crRNAs. In this example, target specific crRNAs were designed and selected for primary screening using defined criteria including in silico off-target detection, e.g., as described herein. Selected crRNAs were chemically synthesized and delivered in a 96 well format. HEK-293-Cas9GFP cells were transfected with target crRNAs comprising a flagpole region of SEQ ID NO: 6607 in a 1:1 ratio with stock trRNA of SEQ ID NO: 6660. The transfection was mediated using lipofection technology according to manufacturer's protocol (DharmaFECT Duo, GE LifeSciences; or RNAiMax, LifeTechnologies). Transfected cells were lysed 24 h following lipofection and editing (e.g., cleavage) was detected within lysates with the T7 E1 assay and/or next generation sequencing (NGS; below).

### T7 E1 Assay

[1480] The T7 E1 assay was used to detect mutation events in genomic DNA such as insertions, deletions and substitutions created through non-homologous end joining (NHEJ) following DNA cleavage by Cas9 (See Cho et al., Targeted genome engineering in human cells with the Cas9 RNA-guided endonuclease. Nature Biotechnology. 2013; 31, 230-232).

[1481] Genomic DNA regions that have been targeted for cutting by CRISPR/Cas9 were amplified by PCR, denatured at 95° C. for 10 minutes, and then re-annealed by ramping down from 95° C. to 25° C. at 0.5° C. per second. If mutations were present within the amplified region, the DNA combined to form heteroduplexes. The re-annealed heteroduplexes were then digested with T7 E1 (New England Biolabs) at 37° C. for 1 hour. T7 E1 endonuclease recognizes DNA mismatches, heteroduplexes and nicked double stranded DNA and generates a double stranded break at these sites. The resulting DNA fragments were analyzed using a Fragment Analyzer and quantified to determine cleavage efficiency.

### Next-Generation Sequencing (NGS) and Analysis for On-Target Cleavage Efficiency and Indel Formation

[1482] To determine the efficiency of editing (e.g., cleaving) the target location in the genome, deep sequencing was utilized to identify the presence of insertions and deletions introduced by non-homologous end joining.

[1483] PCR primers were first designed around the target site, and the genomic area of interest PCR amplified. Additional PCR was performed according to manufacturer's protocols (Illumina) to add the necessary chemistry for sequencing. The amplicons were then sequenced on an Illumina MiSeq instrument. The reads were then aligned to the human reference genome (e.g., hg38) after eliminating those having low quality scores. From the resulting files containing the reads mapped to the reference genome (BAM files), reads which overlap the target region of interest were selected and the number of wild type reads versus the number of reads which contain an insertion or deletion was calculated. The editing percentage was then defined as the total number of reads with insertions or deletions over the total number of reads, including wild type. To determine the pattern of insertions and/or deletions that resulted from the edit, the aligned reads with indels were selected and the number of a reads with a given indel were summed. This information was then displayed as a list as well as visualized in the form on histograms which represent the frequency of each indel.

### RNP Generation

[1484] The addition of crRNA and trRNA (for a dgRNA), or chimeric gRNA (for sgRNA) to Cas9 protein results in the formation of the active Cas9 ribonucleoprotein complex (RNP), which mediates binding to the target region specified by the crRNA and specific cleavage of the targeted genomic DNA. This complex was formed by loading trRNA and crRNA into Cas9, which is believed to cause conformational changes to Cas9 allowing it to bind and cleave dsDNA.

[1485] The crRNA and trRNA were separately denatured at 95° C. for 2 minutes, and allowed to come to room temperature. Cas9 protein (10 mg/ml) was added to 5×CCE buffer (20 mM HEPES, 100 mM KCl, 5 mM MgCl₂, 1 mM DTT, 5% glycerol), to which trRNA and crRNAs were added (in separate reactions) and incubated at 37° C. for 10 minutes, thereby forming the active RNP complex. The complex was delivered by electroporation and other methods into a wide variety of cells, including HEK-293 and CD3+ T cells.

### Delivery of RNPs to T Cells

[1486] CD3+ T cells are comprised of multiple T cell populations including CD4+ T helper cells and CD8+ cytotoxic T cells. These cells can be isolated from whole blood or from leukophoresis samples. T cells can be modified to specifically target cancerous cells and to be less immunogenic, by engineering patient T cells using Cas9-mediated editing. This example describes a basic method used to deliver Cas9 RNP, for example, Cas9 RNP targeting B2M, in T cells. Only the targeting crRNA in the RNP would need to be changed to adapt this protocol to a different T cell target (e.g., any of those provided herein).

[1487] T cells were first enriched from a leukopak using a commercially available kit (e.g., EasySep™ Human T Cell Isolation Kit, Stem Cell Technology). Enriched T cells were aliquoted and frozen down (at 10×106/vial) for future use. Vials were subsequently thawed as needed, and activated by addition of 3:1 ratio of CD3/CD28 beads (Dynabeads, Life Technologies) or using ImmunoCult Human CD3/CD28 T cell Activator (Stem Cell Technologies) in T cell media (RPMI 1640, FBS, L-glutamine, non-essential amino acids, sodium pyruvate, HEPES buffer, 2-mercaptoethanol and optionally IL2). RNPs were generated as described herein, and were added to ˜50,000-100,000 CD3+ T cells resuspended in P3 buffer and nucleofected using the Amaxa nucleofection program EO-115. T cell media was added to cells immediately post-nucleofection and cultured for 24 h or more.

### Example 2: Editing of B2M

Results of Editing Using B2M-Targeted gRNAs in HEK-293 Cells Stably Expressing Cas9

[1488] NGS assay results for cutting efficiency of gRNAs targeting B2M are summarized in Table 9, and in FIG. 1. These results demonstrate that multiple guide RNA molecules are able to mediate high efficiency editing of the B2M locus. The top gRNA molecules, as ranked by % editing in HEK cells (followed by % editing in CD34+ cells) are shown in FIG. 14, together with the results of 1) % editing in CD34+ cells as measured by NGS, and 2) % loss of B2M as measured by flow cytometry in CD3+ T cells). As shown in FIG. 14, three dgRNA molecules, e.g., dgRNA molecules that include the targeting domain of CR00442, CR00444 and CR00455 showed greater than 40% editing in CD3+ T cells as measured by flow cytometry.

TABLE 9
Editing of B2M by dgRNA-CRISPR systems
in HEK-293 Cas9GFP as determined by NGS.
gRNAs are ranked according to % editing in HEK cells.

HEK (NGS) % Editing

| gRNA ID | target name | Mean | Std Dev |
|---|---|---|---|
| CR00465 | B2M | 89.7 | 1.7 |
| CR00443 | B2M | 82.9 | 3.2 |
| CR00445 | B2M | 80.9 | 8.4 |
| CR00444 | B2M | 80.4 | 5.8 |
| CR00449 | B2M | 79.3 | 5.1 |
| CR00442 | B2M | 77.7 | 2.1 |
| CR00453 | B2M | 74.3 | 3.6 |
| CR00461 | B2M | 73.6 | 5.2 |
| CR00439 | B2M | 71.8 | 12.5 |
| CR00452 | B2M | 71.7 | 10.6 |
| CR00455 | B2M | 70.4 | 11.1 |
| CR00463 | B2M | 70.2 | 6.7 |
| CR00467 | B2M | 69.6 | 12.5 |
| CR00466 | B2M | 67.6 | 11.4 |
| CR00446 | B2M | 64.4 | 6.0 |
| CR00440 | B2M | 62.6 | 9.1 |
| CR00472 | B2M | 57.5 | 4.0 |
| CR00459 | B2M | 55.8 | 19.8 |
| CR00468 | B2M | 54.8 | 11.9 |
| CR00469 | B2M | 52.6 | 13.6 |
| CR00450 | B2M | 51.6 | 4.5 |
| CR00456 | B2M | 50.3 | 9.6 |
| CR00454 | B2M | 49.2 | 16.8 |
| CR00464 | B2M | 47.3 | 8.2 |
| CR00460 | B2M | 45.1 | 9.8 |
| CR00457 | B2M | 43.6 | 11.5 |
| CR00451 | B2M | 39.8 | 8.0 |
| CR00462 | B2M | 34.6 | 9.5 |
| CR00470 | B2M | 31.3 | 7.0 |
| CR00447 | B2M | 31.2 | 7.0 |
| CR00458 | B2M | 20.6 | 9.0 |
| CR00471 | B2M | 17.1 | 4.7 |
| CR00473 | B2M | 15.6 | 2.1 |
| CR000129 | B2M | NA | NA |
| CR000131 | B2M | NA | NA |
| CR00438 | B2M | NA | NA |

### Flow Cytometric Analysis of B2M Expression

[1489] A flow based assay was developed to monitor editing efficiency following RNP formulation and delivery. Beta-2-microglobin (B2M) is an essential component of the MHC class I (HLA-type 1) complex that is presented on the surface of all nucleated cells. MHC class I presents endogenous (e.g., self and non-self) peptides to the immune system. A series of crRNAs targeting B2M were tested using flow cytometry assay to detect B2M expression. From this initial screen, crRNAs were identified which showed consistent editing ranging between 5-25%.

[1490] Cells in suspension were labeled with APC conjugated anti-human B2M (BioLegend, cat #316312), PE conjugated anti-human HLA-A,B,C (BioLegend, cat #311405), and propidium iodide (0.5 mg/ml diluted to 1/1000). Appropriate controls were established (e.g., isotype-APC, isotype-PE, PE-anti-HLA separately, APC-anti-B2M separately). The samples were then run on a flow cytometer. In this example, loss of B2M expression as assessed by surface marker staining was indicative of Cas9-mediated editing (e.g., cleavage). Results are reported in FIG. 14.

### Example 3: Editing of TCR and/or PD-1 in T Cells, Including in CAR-T Cells

[1491] Table 10 lists gRNA targeting domains for editing of the genes for TCR alpha and for PD-1. gRNA molecules were generated as described below as sgRNAs comprising, from 5′ to 3′ the indicated targeting domain-SEQ ID NO: 6601-(U)₇.

TABLE 10
gRNA targeting domains to TCR alpha and PD-1

| Id. | gRNA Targeting Domain | SEQ ID NO: |
|---|---|---|
| TRAC-1 | UCUCUCAGCUGGUACACGGC | 5568 |
| (CR000960) | | |
| TRAC-2 | GAGAAUCAAAAUCGGUGAAU | 5572 |
| (CR000964) | | |
| TRAC-3 | AACAAAUGUGUCACAAAGUA | 5574 |
| (CR000966) | | |
| TRAC-5 | AAAGUCAGAUUUGUUGCUCC | 5579 |
| (CR000971) | | |
| TRAC-6 | CUGGGGAAGAAGGUGUCUUC | 5581 |
| (CR000973) | | |
| TRAC-7 | CUCGACCAGCUUGACAUCAC | 5588 |
| (CR000980) | | |
| TRAC-8 | AAGUUCCUGUGAUGUCAAGC | 5587 |
| (CR000979) | | |
| TRAC-9 | UUCGGAACCCAAUCACUGAC | 5592 |
| (CR000984) | | |
| TRAC-10 | GAUUAAACCCGGCCACUUUC | 5599 |
| (CR000991) | | |
| PD1-1 | UGUAGCACCGCCCAGACGAC | 5733 |
| (CR000837) | | |
| PD1-2 | UGCAGAUCCCACAGGCGCCC | 6657 |
| (3′-20 nt of | | |
| 5133_1_37) | | |
| PD1-3 | UGACACGGAAGCGGCAGUCC | 5764 |
| (CR000868) | | |
| PD1-4 | CACGAAGCUCUCCGAUGUGU | 5749 |
| (CR000853) | | |
| PD1-5 | AGGUGCCGCUGUCAUUGCGC | 5777 |
| (CR000881) | | |
| PD1-6 | AGGGCCCGGCGCAAUGACAG | 5775 |
| PD1-7 | CAGCAACCAGACGGACAAGC | 5755 |
| (CR000859) | | |
| PD1-8 | CCUGCUCGUGGUGACCGAAG | 5746 |
| (CR000850) | | |

[1492] Forward and reverse DNA oligonucleotides encoding gRNA molecules comprising the targeting domains listed above in Table 10 were cloned into a lentiviral vector downstream of a U6 promoter. Using standard procedures, briefly, the vector was digested with BBSI for 1 hour at 37° C. The vector was purified using a PCR-purification kit (Qiagen). The gRNA forward and reverse DNA oligonucleotides were synthesized by IDT (Integrated DNA Technologies) with the addition of BBSI site overhangs (ACCG 5′ of the forward oligo and AAAC 5′ of the reverse strand). The oligos were annealed using IDT duplex buffer by heating up to 95° C. and letting cool down at room temperature. The annealed oligo was then ligated to the cut and purified vector using NEB quick ligation kit. The vector also contains nucleic acid encoding Cas9 and a mCherry reporter (mCherry is expressed using a T2A sequence downstream of CAS9) downstream of an EF1-alpha promoter. Lentivirus was packaged using a packaging system (Cellecta catalog number CPCP-K2A). The virus was concentrated 200× for all the CRISPR viral productions. In a 96 well flat bottom plate, 1 E5 Jurkat cells were plated in 100 ul RPMI 10% FBS media. 50 ul of concentrated virus was added directly to each well. Then 24 hours post viral addition 100 ul of media was added to the cells. Cells were cultured by passaging every 3 days by adding new media to maintain the cells at 0.5 e6 cells/mL. Expression of the TCR was measured 7 days post viral transduction. The TCR was detected using anti-CD3 epsilon antibody clone OKT3 conjugated to APC from ebioscience (catalog number 17-0037-42). 1 E5 cells were incubated with 2 ul of antibody for 20 minutes, analyzed by flow cytometery (BD Fortessa). Data was analyzed using Flow Jo software. mCherry positive cells were gated first to detect CRISPR/Cas9 positive cells. This population was analyzed for TCR loss. The results are shown in FIG. 2. These results demonstrate that TCR-alpha targeted gRNAs are able to cause loss of surface TCR expression in Jurkat cells.

Generation of TCR-Primary T Cells Using TCR-Alpha Targeting gRNAs

[1493] The procedure noted above was followed for assessing editing and loss of TCR in primary T cells, with the following modifications. 1 E5 primary T cells were activated on Day 0 using 3:1 dyna beads anti-CD3/CD28 in 10 ul T cells media in a 96 well flat bottom plate. On Day 1 50 ul of lentivirus encoding gRNA and Cas9/mCherry (as described above) was added. T cells were cultured for 12 days by adding fresh media every 2 days to maintain a concentration of 5 E5 cells/ml. Loss of TCR was measured as described above at day 6 and day 12 after lentivirus introduction. The results are shown in FIG. 3. These results demonstrate that TCR-alpha targeted gRNAs are able to cause loss of surface TCR expression in primary T cells.

Generation of PD1-Primary T Cells Using PDCD1 Targeting gRNAs

[1494] Editing of the PD-1 locus and loss of PD-1 expression was assessed as described above using lentiviral vectors encoding gRNA molecules to PD-1 listed in Table 10. Experiments were performed as described above for assessing TCR knockout in primary T cells, except that cells were restimulated with 3:1 dyna beads anti-CD3/CD28 in culture on Day 5 to drive increased expression of PD-1, enabling better detection of the protein. The results are reported in FIG. 4. These results demonstrate that gRNA molecules of the invention targeting PD-1 (PDCD1) lead to high efficiency loss of PD-1 expression in primary T cells.

### Editing of PD-1 or TCR in Primary T Cells Using RNP

[1495] Editing of TCR or PD-1 in primary T cells was tested using Cas9/gRNA Ribonucleoprotein (RNP) complexes. RNPs were generated by mixing 20 ug of CAS9 (PNA bio) and 20 ug of chemically synthesized sgRNA (TriLink biotech) comprising either the targeting domain of TRAC-8 or of PD1-6, and incubating for 15 minutes at room temperature. T cells were isolated from Leukopak PBMCs using Pan T cell Isolation kit (Miltenyi) then activated with 3:1 CD3/CD28 dyna beads (invitrogen). 48 hours post activation, 2 E5 T cells (without bead removal) were centrifuged at 300 g for 6 minutes and resuspended in 20 ul of Optimem and the RNP complex was added and mixed. Then the cells were transferred into a 1 mm electroporation cuvette (BTX) and pulsed using the BTX ECM 830 machine at 250V for 500 us and 1 pulse. The cells were returned into their T cell media and cultured for 5 days before analyses. FIG. 5 shows histograms of TCR or PD-1 expression as detected by flow cytometry after 7 days in culture. These results show that gRNAs targeting TCR alpha and PD-1 are effective at generating either TCR negative or PD1 negative T cells when introduced as RNP.

### TCR Negative CAR T Cells

[1496] The ability of gRNA molecules targeting the TRAC locus to edit and lead to TCR negative phenotype in T cells engineered to express a chimeric antigen receptor (CAR) was determined. On Day 0 primary T cells were activated with 3:1 CD3/CD28 dyna beads at a concentration of 5 E5 cells/ml in T cell media. On Day 1, T cells were engineered to express a CD19 CAR using lentiviral particles. T cells were engineered to express a CD19 CAR using lentiviral particles (lentivirus, as described in WO2012/079000) at MOI of 5−. On Day 2, T cells were electroporated with RNP comprising Cas9 protein and a gRNA molecule comprising the targeting domain of either TRAC-1 or TRAC-8. On Day 4 onwards, T cells were replenished with fresh media every 2 days to maintain a concentration of 5 E5 cells/ml. On day 11 of T cell culture, the T cells were counted, and CD3 microbeads from Miltenyi biotech were added per manufacturer protocol. An LD magnetic column (Miltenyi) was used to perform the positive selection. As shown in FIG. 6, T cell populations which were ˜40-50% TCR negative could be enriched to create isolated populations of TCRnegative CART cells at greater than 98% purity.

### Activity of TCR Negative CART Cells

[1497] The T cells were cultured under standard culture conditions with the following modifications. On day 2 T cells were electroporated with RNP comprising gRNA targeting TCR alpha (TRAC-1 or TRAC-8) as described in “Editing of PD-1 or TCR in primary T cells using RNP,” above, or were transduced with lentivirus encoding said gRNA and Cas9/mCherry, as described in Generation of TCR− primary T cells using TCR-alpha targeting gRNAs,” above. On day 11 a purification of TCR− cells was added described in “TCR− CAR T cells,” above. Isolated TCR negative cells were co-cultured with luciferase-expressing CD19+ NALM6 (B-ALL cell) or CD19− K562 (CML cell) cells and the ability of the TCR− CART cells to specifically kill CD19+ cells was assessed. The results are shown in FIG. 7 (% cell lysis), and demonstrate that TCR negative CD19 CART cells comprising TCR-targeting gRNAs (by either lentiviral or RNP transfection) are capable of specifically killing CD19+ cells.

### Example 4: B2M Excision Using Two gRNA Molecules

[1498] To test the ability of two gRNA molecules which bind to the same gene to excise large section of the target gene, we exposed cells to two gRNA molecules. In each experiment, CR00442 was used, in addition to a second gRNA molecule predicted to bind to a target site located from about 10 to about 6000 base pairs away from the binding site of CR00442. FIG. 8 shows the predicted excision product size based on the number of base pairs between the two gRNA molecule target sites. Experiments were performed as above, with crRNA molecules comprising the targeting domains of the indicated gRNA molecule (e.g., CR00442) and trRNA being transfected into HEK293 cells engineered to stably express Cas9. Cell lysates were collected at 24 hours and subjected to PCR. FIGS. 9-11 show the results of these experiments. As shown in FIG. 9, CR00442 paired with CR00438, CR00439, CR00440, CR00445 or CR00446 showed DNA fragments corresponding to the expected excision product, ranging from 40-65 base pairs. Pairs of gRNA molecules expected to yield excision products less than 20 base pairs did not result in a detectable excision product as measured by PCR. As shown in FIGS. 10 and 11, when the expected excision product is about 4000 base pairs (FIG. 10) or about 6000 base pairs (FIG. 11), many of the guide pairs produced the expected excision with >10% editing. These results demonstrate the feasibility of excising large portions of DNA from a host gene or genome through the use of two gRNA molecules, and offer an alternative approach to deactivate a gene or gene product.

### Example 5: Editing of TRAC in HEK and Primary Human CD3+ Cells

[1499] Editing of CRISPR systems containing dgRNA molecules comprising targeting domains to sequences of TRAC were tested for editing in HEK (gRNA delivered to cells stably expressing Cas9) and in primary CD3+ T cells (gRNA/Cas9 RNP delivered by electroporation) according to the methods described herein. As well, surface expression of TCR after editing was assayed by flow cytometry. Briefly, edited CD3+ cells were stained with antibodies against CD3 (OKT3, eBioscience) and/or TCR-alpha/beta (IP26 #, Biolegend) at day 3-5 post-electroporation. Expression of CD3 or TCR-alpha/beta in live cells (identified by propidium iodide exclusion) relative to the un-edited controls was used to determine frequency of RNP editing.

[1500] The results are reported in Table 11. All mean editing % are as measured by NGS and are based on at least 3 experiments. gRNA molecules are ranked by the % editing in HEK cells. FIG. 12 shows the top gRNA molecules to TRAC as ranked according to the % editing in HEK cells, together with the flow cytometry data showing the % editing in primary human CD3+ T cells as measured by loss of surface expression of TCR.

[1501] The indels formed after editing in CD3+ T cells were also assayed. The % of edited cells containing a frameshift mutation is shown in Table 11 (“mean FS edit %). As the TRAC locus results in an expressed protein, it is possible that 3 bp deletions or insertions may not result in disruption and degradation of TRAC. In contrast, frameshift mutations (1-2 bp in/dels) would cause the sequence subsequent to the edit to be out of frame and likely result in nonsense mediated degradation. Of note, there were often large differences in the editing % between the HEK and CD3+ T cells, namely the % editing in T cells was typically less than that observed in HEK cells. These differences were reproducible across multiple samples, including in Jurkat cells and different donor sources of primary T cells (not shown). Without being bound by theory, one explanation may be that the TCR locus undergoes rearrangement in T cells and Jurkat cells, but not in HEK cells. Indeed, NGS sequencing runs consistently failed or were of poor quality for the T cells or the Jurkat cells, regardless of donor, primers used or days post-editing that the cells were harvested for analysis (not shown). Thus, a more reliable measurement of % editing in primary T cells may be knockout at the protein level (e.g., loss of TCR by flow cytometry).

TABLE 11

| | | CD3+ (NGS) | | | | | |
|---|---|---|---|---|---|---|---|
| | | mean | | | | HEK (NGS) | |
| | | total % | | mean FS | | mean % | |
| gRNA ID | Target | edit | SD | edit (%) | SD2 | edit | SD |
| CR000961 | TRAC | 3.4 | 0.9 | 3.1 | 0.7 | 87.9 | 2.8 |
| CR000924 | TRAC | 37.4 | 6.1 | 30.9 | 5.5 | 87.3 | 2.9 |
| CR000948 | TRAC | 20.3 | 4.5 | 18.4 | 6.1 | 84.5 | 5.6 |
| CR000931 | TRAC | 37.7 | 11.4 | 34.9 | 9.3 | 83.6 | 7.6 |
| CR000929 | TRAC | 40.3 | 6.3 | 36.1 | 4.8 | 81.6 | 0.7 |
| CR000977 | TRAC | 44.2 | 4.5 | 35.7 | 4.4 | 80.6 | 4.8 |
| CR000944 | TRAC | 4.3 | 4.5 | 4.3 | 4.6 | 77.6 | 8.5 |
| CR000984 | TRAC | 52.1 | 4.6 | 42.1 | 4.2 | 77.0 | 5.3 |
| CR000933 | TRAC | 30.6 | 12.5 | 25.2 | 8.3 | 74.8 | 8.6 |
| CR000926 | TRAC | 22.5 | 9.2 | 19.9 | 6.9 | 73.0 | 4.5 |
| CR000943 | TRAC | 18.1 | 13.9 | 14.5 | 11.3 | 72.4 | 9.2 |
| CR000959 | TRAC | 2.4 | 0.4 | 2.1 | 0.2 | 71.9 | 4.1 |
| CR000993 | TRAC | 24.1 | 5.7 | 17.8 | 3.9 | 71.0 | 5.3 |
| CR000947 | TRAC | 7.2 | 3.3 | 6.5 | 2.8 | 70.7 | 9.5 |
| CR000981 | TRAC | 37.6 | 10.0 | 25.1 | 3.5 | 70.0 | 11.6 |
| CR000992 | TRAC | 33.7 | 12.0 | 29.1 | 12.0 | 69.2 | 12.4 |
| CR001002 | TRAC | 21.8 | 3.7 | 19.7 | 4.8 | 69.1 | 5.2 |
| CR001000 | TRAC | 26.2 | 9.5 | 22.7 | 7.6 | 68.9 | 7.4 |
| CR000927 | TRAC | 23.8 | 4.5 | 22.6 | 4.1 | 68.7 | 7.2 |
| CR000986 | TRAC | 36.4 | 5.1 | 14.8 | 3.0 | 68.6 | 14.9 |
| CR000963 | TRAC | 32.5 | 7.1 | 25.3 | 6.3 | 68.4 | 5.4 |
| CR000985 | TRAC | 17.7 | 5.4 | 16.3 | 4.4 | 68.1 | 10.0 |
| CR000923 | TRAC | 37.3 | 6.5 | 32.7 | 4.6 | 67.4 | 3.3 |
| CR000953 | TRAC | 17.7 | 2.1 | 14.4 | 1.1 | 66.0 | 12.8 |
| CR000946 | TRAC | 9.8 | 2.9 | 9.2 | 2.3 | 65.9 | 10.1 |
| CR000932 | TRAC | 9.9 | 3.3 | 7.9 | 4.1 | 65.7 | 7.8 |
| CR001009 | TRAC | 27.3 | 9.4 | 22.8 | 7.8 | 65.3 | 10.6 |
| CR000966 | TRAC | 22.0 | 2.9 | 21.0 | 2.6 | 65.2 | 2.7 |
| CR001011 | TRAC | 13.2 | 1.2 | 10.8 | 1.8 | 64.8 | 13.5 |
| CR001012 | TRAC | 31.5 | 14.2 | 22.9 | 12.0 | 64.5 | 1.4 |
| CR000990 | TRAC | 36.1 | 7.0 | 25.3 | 5.9 | 63.7 | 8.9 |
| CR000951 | TRAC | 6.7 | 3.0 | 6.0 | 3.5 | 63.5 | 16.5 |
| CR001001 | TRAC | 14.4 | 0.2 | 10.9 | 0.4 | 61.8 | 8.0 |
| CR000978 | TRAC | 24.7 | 5.1 | 20.8 | 4.4 | 60.7 | 2.3 |
| CR000934 | TRAC | 4.4 | 3.0 | 4.1 | 2.6 | 60.6 | 4.6 |
| CR000950 | TRAC | 7.5 | 0.8 | 5.4 | 0.4 | 60.4 | 9.2 |
| CR000920 | TRAC | 12.8 | 1.9 | 10.5 | 0.4 | 60.2 | 12.9 |
| CR000991 | TRAC | 51.2 | 8.1 | 45.4 | 6.9 | 60.1 | 6.4 |
| CR000956 | TRAC | 2.2 | 0.5 | 1.9 | 0.0 | 59.9 | 10.5 |
| CR000983 | TRAC | 26.6 | 2.0 | 18.2 | 0.7 | 59.8 | 1.8 |
| CR000936 | TRAC | NA | NA | NA | NA | 59.7 | 12.9 |
| CR000960 | TRAC | 1.2 | 0.1 | 1.2 | 0.2 | 59.4 | 6.5 |
| CR001007 | TRAC | 22.0 | 4.4 | 19.0 | 3.2 | 58.4 | 13.9 |
| CR000921 | TRAC | 12.7 | 2.0 | 11.3 | 1.1 | 58.3 | 9.1 |
| CR000952 | TRAC | 5.8 | 1.7 | 5.6 | 1.8 | 57.9 | 7.9 |
| CR000925 | TRAC | 19.1 | 4.3 | 12.3 | 5.1 | 56.9 | 6.1 |
| CR001006 | TRAC | 13.6 | 4.3 | 10.4 | 3.2 | 56.8 | 14.3 |
| CR000942 | TRAC | 9.8 | 6.4 | 9.8 | 6.3 | 56.8 | 1.6 |
| CR000938 | TRAC | 13.9 | 0.3 | 12.5 | 2.2 | 55.0 | 7.1 |
| CR000940 | TRAC | 22.1 | 4.7 | 14.4 | 4.1 | 55.0 | 10.4 |
| CR000989 | TRAC | 28.2 | 12.5 | 18.2 | 7.6 | 54.5 | 1.1 |
| CR000928 | TRAC | 18.1 | 1.8 | 14.6 | 0.4 | 54.2 | 22.1 |
| CR000935 | TRAC | NA | NA | NA | NA | 54.2 | 8.2 |
| CR001003 | TRAC | 13.6 | 4.6 | 10.1 | 4.3 | 53.5 | 9.5 |
| CR001014 | TRAC | 27.3 | 6.8 | 24.3 | 5.9 | 52.7 | 4.3 |
| CR000996 | TRAC | 11.1 | 0.7 | 8.6 | 0.2 | 52.3 | 7.3 |
| CR000967 | TRAC | 31.1 | 6.3 | 27.3 | 3.8 | 51.9 | 2.7 |
| CR000968 | TRAC | 26.1 | 4.1 | 24.1 | 4.2 | 51.6 | 10.5 |
| CR000964 | TRAC | 27.0 | 7.9 | 23.5 | 8.9 | 51.2 | 8.9 |
| CR000937 | TRAC | 15.8 | 3.4 | 10.8 | 2.0 | 50.9 | 6.6 |
| CR001005 | TRAC | 13.9 | 2.4 | 13.0 | 2.4 | 50.5 | 12.9 |
| CR001010 | TRAC | 21.2 | 4.4 | 18.6 | 3.2 | 48.3 | 7.0 |
| CR000982 | TRAC | 28.5 | 8.9 | 23.2 | 7.3 | 48.1 | 9.5 |
| CR001004 | TRAC | 6.7 | 2.8 | 6.4 | 2.5 | 47.2 | 15.3 |
| CR000994 | TRAC | 21.5 | 2.7 | 10.8 | 0.6 | 46.9 | 3.4 |
| CR000988 | TRAC | 22.3 | 4.7 | 17.4 | 3.5 | 41.9 | 5.4 |
| CR000973 | TRAC | 16.2 | 1.0 | 12.4 | 1.1 | 39.7 | 16.1 |
| CR000987 | TRAC | 20.6 | 1.8 | 18.2 | 2.2 | 39.6 | 4.0 |
| CR000922 | TRAC | 6.4 | 4.5 | 5.0 | 3.4 | 37.8 | 7.6 |
| CR001015 | TRAC | 21.8 | 0.2 | 20.4 | 0.0 | 35.9 | 17.5 |
| CR000969 | TRAC | 24.8 | 6.0 | 20.9 | 4.4 | 34.0 | 4.9 |
| CR000941 | TRAC | 9.6 | 4.5 | 7.6 | 4.1 | 33.4 | 3.9 |
| CR000945 | TRAC | 2.3 | 1.1 | 2.2 | 1.1 | 32.3 | 7.2 |
| CR000949 | TRAC | 2.5 | 2.0 | 2.5 | 1.9 | 30.2 | 6.2 |
| CR001013 | TRAC | 19.6 | 11.5 | 17.6 | 10.0 | 29.7 | 5.3 |
| CR000939 | TRAC | 13.5 | 3.1 | 12.1 | 2.2 | 27.7 | 5.2 |
| CR000995 | TRAC | 1.9 | 1.8 | 2.5 | 1.2 | 23.2 | 6.3 |
| CR000954 | TRAC | 2.7 | 0.4 | 2.6 | 0.3 | 22.3 | 6.7 |
| CR000962 | TRAC | 10.4 | 1.3 | 8.6 | 1.2 | 21.3 | 5.0 |
| CR000958 | TRAC | 1.0 | 0.3 | 1.0 | 0.3 | 20.4 | 4.4 |
| CR000972 | TRAC | 6.9 | 2.5 | 6.4 | 2.3 | 16.2 | 4.9 |
| CR001008 | TRAC | 5.1 | 1.1 | 4.5 | 0.9 | 13.6 | 1.7 |
| CR000970 | TRAC | 10.9 | 2.3 | 9.3 | 2.8 | 13.4 | 4.7 |
| CR000999 | TRAC | 12.0 | 2.4 | 11.4 | 2.1 | 13.1 | 17.9 |
| CR000930 | TRAC | 9.9 | 0.6 | 7.1 | 3.2 | 12.2 | 1.6 |
| CR000997 | TRAC | 6.7 | 0.8 | 6.4 | 0.8 | 11.6 | 4.7 |
| CR000955 | TRAC | 2.7 | 0.7 | 2.7 | 0.7 | 10.0 | 1.5 |
| CR000975 | TRAC | 3.8 | 2.0 | 3.1 | 1.4 | 8.0 | 0.8 |
| CR000998 | TRAC | 2.4 | 0.6 | 2.2 | 0.8 | 4.3 | 1.3 |
| CR000974 | TRAC | 1.9 | 0.5 | 1.8 | 0.6 | 3.3 | 0.8 |
| CR000971 | TRAC | 3.0 | 1.0 | 2.4 | 0.5 | 3.1 | 0.6 |
| CR000979 | TRAC | 2.2 | 1.0 | 2.2 | 1.0 | 3.0 | 0.4 |
| CR000976 | TRAC | 1.8 | 0.6 | 1.7 | 0.6 | 2.8 | 0.1 |
| CR000957 | TRAC | 1.3 | 0.0 | 1.3 | 0.0 | 1.6 | 0.4 |
| CR000965 | TRAC | 1.0 | 0.1 | 1.0 | 0.1 | 1.4 | 0.1 |
| CR000980 | TRAC | 33.0 | 5.0 | 26.1 | 3.7 | N/A | N/A |

[1502] Editing in primary human T cells with systems comprising gRNAs targeting TRAC were next tested in primary human CD3+ T cells from 3 different donors. As shown in FIG. 15, % editing (as determined by loss of TCR by flow cytometry) was consistent across all donors. These data demonstrated that certain gRNA molecules, in combination with Cas9, were capable of creating indels within the TCR-alpha sub-unit that result in loss of TCR expression on the surface of T cells. The editing efficiency is donor independent thus showing the broad applicability of this approach.

### Example 6: Editing of TRBC1 and TRBC2 in HEK Cells

[1503] Editing of CRISPR systems containing dgRNA molecules comprising targeting domains to sequences of TRBC1 and TRBC2 were tested for editing in HEK (gRNA delivered to cells stably expressing Cas9) and CD3+ T cells (gRNA and Cas9 delivered as RNP) according to the methods described herein. The results are reported in Table 12. All mean editing % are as measured by NGS and are based on at least 3 experiments. FIG. 13 shows the top gRNA molecules to TRBC1 and TRBC2 as ranked according to the % editing in HEK cells, together with the flow cytometry data showing the % editing in primary human CD3+ T cells as measured by loss of surface expression of TCR.

TABLE 12

| | | | HEK (NGS) | |
|---|---|---|---|---|
| | | Coding vs non-coding | mean total | |
| gRNA ID | Target | targeted region | % edit | SD |
| CR000789 | TRBC2 | Non-coding | 62% | 3% |
| CR000780 | TRBC2 | Non-coding | 60% | 9% |
| CR000734 | TRBC1 | Non-coding | 59% | 6% |
| CR000761 | TRBC2 | Non-coding | 57% | 2% |
| CR000776 | TRBC2 | Non-coding | 54% | 9% |
| CR000786 | TRBC2 | Non-coding | 53% | 7% |
| CR000785 | TRBC2 | Non-coding | 52% | 4% |
| CR000737 | TRBC1 | Non-coding | 52% | 5% |
| CR000775 | TRBC2 | Non-coding | 51% | 5% |
| CR000783 | TRBC2 | Non-coding | 51% | 5% |
| CR000823 | TRBC2 | Coding | 51% | 6% |
| CR000756 | TRBC2 | Non-coding | 45% | 2% |
| CR000798 | TRBC2 | Non-coding | 44% | 2% |
| CR000735 | TRBC1 | Non-coding | 44% | 7% |
| CR000731 | TRBC1 | Non-coding | 44% | 5% |
| CR000729 | TRBC1 | Non-coding | 43% | 4% |
| CR000774 | TRBC2 | Non-coding | 43% | 5% |
| CR000810 | TRBC2 | Coding | 42% | 9% |
| CR000800 | TRBC2 | Coding | 41% | 13% |
| CR000784 | TRBC2 | Non-coding | 40% | 3% |
| CR000762 | TRBC2 | Non-coding | 40% | 5% |
| CR000782 | TRBC2 | Non-coding | 40% | 4% |
| CR000815 | TRBC2 | Coding | 39% | 9% |
| CR000748 | TRBC2 | Non-coding | 39% | 3% |
| CR000760 | TRBC2 | Non-coding | 38% | 3% |
| CR000781 | TRBC2 | Non-coding | 37% | 4% |
| CR000812 | TRBC2 | Coding | 37% | 7% |
| CR000732 | TRBC1 | Non-coding | 36% | 5% |
| CR000788 | TRBC2 | Coding | 36% | 7% |
| CR000752 | TRBC2 | Non-coding | 36% | 13% |
| CR000745 | TRBC1 | Non-coding | 34% | 4% |
| CR000759 | TRBC2 | Non-coding | 33% | 7% |
| CR000813 | TRBC2 | Coding | 32% | 4% |
| CR000770 | TRBC2 | Non-coding | 32% | 7% |
| CR000738 | TRBC1 | Coding | 31% | 5% |
| CR000816 | TRBC2 | Coding | 31% | 8% |
| CR000744 | TRBC1 | Non-coding | 31% | 2% |
| CR000807 | TRBC2 | Coding | 31% | 4% |
| CR000811 | TRBC2 | Coding | 30% | 7% |
| CR000766 | TRBC2 | Non-coding | 30% | 2% |
| CR000787 | TRBC2 | Non-coding | 30% | 1% |
| CR000751 | TRBC2 | Non-coding | 30% | 6% |
| CR000730 | TRBC1 | Non-coding | 29% | 3% |
| CR000739 | TRBC1 | Non-coding | 28% | 6% |
| CR000768 | TRBC2 | Non-coding | 28% | 2% |
| CR000771 | TRBC2 | Non-coding | 27% | 4% |
| CR000763 | TRBC2 | Non-coding | 26% | 4% |
| CR000754 | TRBC2 | Non-coding | 26% | 7% |
| CR000755 | TRBC2 | Non-coding | 24% | 4% |
| CR000769 | TRBC2 | Non-coding | 24% | 1% |
| CR000777 | TRBC2 | Non-coding | 23% | 1% |
| CR000764 | TRBC2 | Non-coding | 23% | 6% |
| CR000749 | TRBC2 | Non-coding | 23% | 5% |
| CR000767 | TRBC2 | Non-coding | 23% | 5% |
| CR000791 | TRBC2 | Non-coding | 23% | 4% |
| CR000809 | TRBC2 | Coding | 22% | 8% |
| CR000773 | TRBC2 | Non-coding | 22% | 7% |
| CR000817 | TRBC2 | Coding | 21% | 6% |
| CR000746 | TRBC1 | Non-coding | 21% | 4% |
| CR000753 | TRBC2 | Non-coding | 21% | 1% |
| CR000757 | TRBC2 | Non-coding | 21% | 1% |
| CR000793 | TRBC2 | Non-coding | 21% | 4% |
| CR000743 | TRBC1 | Non-coding | 20% | 4% |
| CR000741 | TRBC1 | Non-coding | 20% | 2% |
| CR000819 | TRBC2 | | 20% | 3% |
| CR000740 | TRBC1 | Non-coding | 19% | 2% |
| CR000814 | TRBC2 | Coding | 19% | 7% |
| CR000728 | TRBC1 | Non-coding | 16% | 6% |
| CR000742 | TRBC1 | Non-coding | 14% | 3% |
| CR000733 | TRBC1 | Non-coding | 10% | 4% |
| CR000747 | TRBC1 | Non-coding | 8% | 1% |
| CR000736 | TRBC1 | Non-coding | 8% | 1% |

[1504] These data demonstrated that certain gRNA molecules, in combination with Cas9, were capable of creating indels within the TCR-beta sub-unit that result in loss of TCR expression on the surface of T cells.

### Example 7: Editing of PDCD1 in HEK Cells and Primary Human CD3+ T Cells

[1505] Editing of CRISPR systems containing dgRNA molecules comprising targeting domains to sequences of PDCD1 were tested for editing in HEK (gRNA delivered to cells stably expressing Cas9) and CD3+ T cells (gRNA and Cas9 delivered as RNP) according to the methods described herein.

[1506] The results of editing in HEK cells are reported in Table 13. All mean editing % are as measured by NGS and are based on at least 3 experiments. FIG. 16 shows the top gRNA molecules to PDCD1 as ranked according to the % editing in HEK cells. FIG. 16 also shows % of cells with loss of PD-1 expression as measured by flow cytometry using an anti-PD-1 antibody (ceBioJ105, eBioscience). Briefly, primary human CD3+ T cells were activated with StemCell ImmunoCult beginning on day 0. RNP containing the indicated dgRNA were electroporated into the cells on day 3 (Neon; 1600 V, 10 ms, 3 pulses). 2 days after transfection (day 5), cells were stimulated with antiCD3/CD28 Dynabeads (1:3 cell:bead ratio). PD-1 expression was assessed on day 10.

TABLE 13

| | |
|---|---|
| target | HEK (NGS) % Editing |

| gRNA ID | name | Mean | Std Dev |
|---|---|---|---|
| CR000847 | PDCD1 | 77% | 1% |
| CR000902 | PDCD1 | 72% | 8% |
| CR000852 | PDCD1 | 72% | 5% |
| CR000826 | PDCD1 | 70% | 7% |
| CR000904 | PDCD1 | 70% | 2% |
| CR000839 | PDCD1 | 69% | 10% |
| CR000828 | PDCD1 | 69% | 4% |
| CR000835 | PDCD1 | 69% | 6% |
| CR000829 | PDCD1 | 68% | 6% |
| CR000879 | PDCD1 | 68% | 8% |
| CR000870 | PDCD1 | 66% | 8% |
| CR000831 | PDCD1 | 66% | 13% |
| CR000848 | PDCD1 | 65% | 4% |
| CR000855 | PDCD1 | 61% | 21% |
| CR000838 | PDCD1 | 61% | 12% |
| CR000840 | PDCD1 | 59% | 5% |
| CR000884 | PDCD1 | 59% | 7% |
| CR000830 | PDCD1 | 57% | 12% |
| CR000871 | PDCD1 | 57% | 8% |
| CR000850 | PDCD1 | 55% | 9% |
| CR000869 | PDCD1 | 55% | 6% |
| CR000903 | PDCD1 | 54% | 8% |
| CR000824 | PDCD1 | 54% | 7% |
| CR000882 | PDCD1 | 50% | 11% |
| CR000918 | PDCD1 | 50% | 9% |
| CR000895 | PDCD1 | 49% | 10% |
| CR000832 | PDCD1 | 49% | 8% |
| CR000874 | PDCD1 | 47% | 5% |
| CR000868 | PDCD1 | 47% | 7% |
| CR000846 | PDCD1 | 46% | 6% |
| CR000887 | PDCD1 | 46% | 6% |
| CR000825 | PDCD1 | 46% | 6% |
| CR000892 | PDCD1 | 45% | 11% |
| CR000917 | PDCD1 | 43% | 9% |
| CR000896 | PDCD1 | 42% | 7% |
| CR000919 | PDCD1 | 42% | 8% |
| CR000863 | PDCD1 | 40% | 9% |
| CR000842 | PDCD1 | 40% | 15% |
| CR000827 | PDCD1 | 39% | 11% |
| CR000837 | PDCD1 | 36% | 8% |
| CR000915 | PDCD1 | 35% | 10% |
| CR000833 | PDCD1 | 34% | 5% |
| CR000853 | PDCD1 | 33% | 4% |
| CR000891 | PDCD1 | 29% | 11% |
| CR000849 | PDCD1 | 29% | 7% |
| CR000897 | PDCD1 | 26% | 2% |
| CR000872 | PDCD1 | 26% | 5% |
| CR000844 | PDCD1 | 25% | 3% |
| CR000854 | PDCD1 | 24% | 6% |
| CR000867 | PDCD1 | 24% | 4% |
| CR000856 | PDCD1 | 23% | 4% |
| CR000845 | PDCD1 | 21% | 6% |
| CR000881 | PDCD1 | 21% | 3% |
| CR000894 | PDCD1 | 19% | 3% |
| CR000834 | PDCD1 | 19% | 7% |
| CR000841 | PDCD1 | 19% | 1% |
| CR000858 | PDCD1 | 16% | 2% |
| CR000859 | PDCD1 | 12% | 3% |
| CR000898 | PDCD1 | 11% | 3% |
| CR000880 | PDCD1 | 10% | 2% |
| CR000893 | PDCD1 | 10% | 1% |
| CR000885 | PDCD1 | 10% | 1% |
| CR000883 | PDCD1 | 9% | 1% |
| CR000843 | PDCD1 | 8% | 2% |
| CR000864 | PDCD1 | 7% | 1% |
| CR000875 | PDCD1 | 6% | 2% |
| CR000899 | PDCD1 | 5% | 3% |
| CR000890 | PDCD1 | 5% | 2% |
| CR000914 | PDCD1 | 5% | 1% |
| CR000836 | PDCD1 | 5% | 1% |
| CR000916 | PDCD1 | 5% | 1% |
| CR000877 | PDCD1 | 5% | 1% |
| CR000888 | PDCD1 | 4% | 1% |
| CR000866 | PDCD1 | 4% | 1% |
| CR000851 | PDCD1 | 4% | 0% |
| CR000865 | PDCD1 | 4% | 1% |
| CR000889 | PDCD1 | 3% | 0% |
| CR000876 | PDCD1 | 3% | 0% |
| CR000886 | PDCD1 | 2% | 0% |
| CR000857 | PDCD1 | 1% | 0% |
| CR000878 | PDCD1 | 1% | 0% |
| CR000860 | PDCD1 | NA | NA |
| CR000861 | PDCD1 | NA | NA |
| CR000862 | PDCD1 | NA | NA |
| CR000873 | PDCD1 | NA | NA |
| CR000900 | PDCD1 | NA | NA |
| CR000901 | PDCD1 | NA | NA |
| CR000905 | PDCD1 | NA | NA |
| CR000906 | PDCD1 | NA | NA |
| CR000907 | PDCD1 | NA | NA |
| CR000908 | PDCD1 | NA | NA |
| CR000909 | PDCD1 | NA | NA |
| CR000910 | PDCD1 | NA | NA |
| CR000911 | PDCD1 | NA | NA |
| CR000912 | PDCD1 | NA | NA |
| CR000913 | PDCD1 | NA | NA |

[1507] Next, editing of PDCD1 by RNPs comprising dgRNA molecules that include the targeting domain of the indicated CRxxxx ID was assayed in primary human CD3+ T cells as measured by NGS, and loss of PD-1 surface expression was assayed by flow cytometry, as described herein. The results are reported at FIG. 18. Several gRNA molecules show good editing and loss of PD-1. These same guides were then tested in CD3+ T cells from three different donors. The data is reported at FIG. 19. As shown, gRNAs including the targeting domain of CR00852, CR00828, CR00870, CR00848, CR00855 and CR00838 show greater than 50% editing across at least 2 donors.

### Example 8: Simultaneous and Sequential Knockout of TRAC and B2M in Primary Human CD3+ T Cells

[1508] Primary human CD3+ T cells were activated and electroporated with RNP containing gRNA to B2M (CR000442) and/or TRAC (CR000984). Briefly, RNPs targeting B2M and/or TRAC were electroporated into CD3+ T cells in the following ratios: B2M RNP only; TRAC RNP only; B2M RNP+TRAC RNP; 0.5×B2M RNP+0.5×TRAC RNP; 0.5×B2M RNP+1×TRAC RNP; 1×B2M RNP+0.5×TRAC RNP; no RNPs. This allowed us to determine the effect of various amounts of RNP (1 or 2 targets) on cell viability and editing efficiency of the targeted genes. Cells were assessed by flow cytometry for both TCR expression and B2M expression. The results are showing in FIG. 17A-17D. These results showed that RNPs targeting two separate targets could be delivered simultaneously to CD3+ T cells by electroporation without negative impact on viability or compromising the editing efficiency of either guide. Additionally, a high frequency of CD3+ T cells were successfully edited at both targets resulting in a CD3-B2M-population.

[1509] Next, the effect of editing two targets, B2M and TRAC by either simultaneous or sequential introduction of RNPs containing dgRNAs to B2M and TRAC. For this experiment, RNPs were generated as described above using a dgRNA comprising the targeting domain of CR000442 for targeting of B2M and using a dgRNA comprising the targeting domain of CR000984 for targeting TRAC. Briefly, CD3+ T cells were thawed, activated for 3 days (Immunocult CD3/CD28 T cell activator from StemCell Technologies). On day 3 and day 4 (sequential) or day 3 (Simultaneous), cells were electroporated to introduce RNPs, and maintained until day 5 post-delivery (Day 9), when expression of B2M and/or TCR was assessed by FACS (then by NGS following cell lysis). T cells were maintained in the presence of activating reagent throughout the electroporation and post-electroporation process. Expression of B2M and TCR were assessed by FACS (using anti-B2M clone 2M2 or anti-CD3 clone OKT3 at 1:200 dilution). Cells were subsequently lysed and editing of the targeted loci assessed by NGS. The results are reported at FIGS. 25 and 26. These results indicate that both sequential and simultaneous targeting of B2M and TRAC yield similar double knockout frequencies.

### Example 9: Editing of FKBP1A

[1510] Editing of FKBP1A with dgRNAs targeted to the FKBP1A gene were assayed in HEK293 cells engineered to express Cas9, as described above. The data, including % editing and the % of frameshift (FS) edit, are reported in FIG. 21, FIG. 22, and FIG. 23. Based on these results, the top 15 gRNA molecules were identified by highest percent FS edit. These gRNA molecules, including their targeting domains, are reported in FIG. 23. Next, editing of FKBP1A in CD3+ T cells was assayed using RNPs comprising dual guides comprising the identified targeting domain to FKBP1A. Cells, RNPs and all methods were formed and performed as described above. The results are reported in FIG. 24.

[1511] To follow up on the previous experiments, gRNAs comprising the targeting domains of the most efficient editing gRNAs were tested again in primary human T cells. FIG. 52 shows the genomic editing of the FKBP1A locus resulting from human primary T cell electroporation with RNPs containing the indicated gRNAs targeting FKBP1A in dgRNA format (as described above). The frequency of insertions or deletions is indicated (% indels) and the percentage of these edits that result in frameshifting of the coding sequence is shown. The results demonstrate a subset of gRNAs which are able to achieve high editing efficiency (>80%) with a high proportion of frameshift edits (>65%). FIG. 53 shows the top 5 most frequently observed sequence changes (indels) for each FKBP1A targeting gRNA used for primary human T cell editing.

### Example 10: Editing of CIITA

[1512] Editing of CIITA with dgRNAs targeted to the CIITA gene were assayed in HEK293 cells engineered to express Cas9, as described above in Example 1. The data, including % editing and the % of frameshift (FS) edit, are reported below in Table 24.

TABLE 24
% editing (N = 3) and % Frameshift edit (FS) as measured
by NGS in HEK293 cells stably expressing Cas9 using dgRNAs
that include the targeting domain to CIITA as indicated.
gRNA molecules are ranked in the table by % edit.

| | | HEK293_Cas9 Cells | | | | |
|---|---|---|---|---|---|---|
| | | Avg. % | StdDev % | Avg. % | StdDev % | |
| ID | Target | Edit | Edit | FS | FS | Rank |
| CR002993 | CIITA | 60.16 | 6.68 | 48.86 | 4.24 | 1 |
| CR002991 | CIITA | 59.11 | 9.04 | 51.40 | 8.37 | 2 |
| CR002995 | CIITA | 52.74 | 11.49 | 43.64 | 9.45 | 3 |
| CR002948 | CIITA | 52.71 | 7.63 | 48.08 | 6.93 | 4 |
| CR002980 | CIITA | 50.30 | 13.62 | 42.41 | 11.48 | 5 |
| CR002961 | CIITA | 50.29 | 6.60 | 38.41 | 4.64 | 6 |
| CR003001 | CIITA | 47.64 | 11.32 | 43.30 | 10.38 | 7 |
| CR002992 | CIITA | 46.54 | 12.64 | 31.23 | 7.79 | 8 |
| CR002971 | CIITA | 45.94 | 13.74 | 33.61 | 9.92 | 9 |
| CR002976 | CIITA | 45.36 | 14.84 | 37.66 | 12.71 | 10 |
| CR002967 | CIITA | 44.47 | 21.39 | 38.77 | 18.85 | 11 |
| CR003007 | CIITA | 43.64 | 12.08 | 32.22 | 8.81 | 12 |
| CR002953 | CIITA | 43.60 | 11.37 | 34.95 | 9.42 | 13 |
| CR002994 | CIITA | 42.35 | 8.53 | 31.32 | 5.55 | 14 |
| CR002965 | CIITA | 41.85 | 16.72 | 29.63 | 10.99 | 15 |
| CR002972 | CIITA | 41.06 | 12.07 | 28.56 | 9.07 | 16 |
| CR003011 | CIITA | 38.96 | 19.22 | 22.19 | 10.64 | 17 |
| CR002978 | CIITA | 38.34 | 18.04 | 34.11 | 16.14 | 18 |
| CR003013 | CIITA | 37.75 | 11.18 | 29.94 | 8.82 | 19 |
| CR002962 | CIITA | 37.71 | 10.14 | 26.10 | 7.04 | 20 |
| CR002966 | CIITA | 37.12 | 18.00 | 31.49 | 15.77 | 21 |
| CR002981 | CIITA | 36.28 | 15.11 | 29.98 | 12.29 | 22 |
| CR002983 | CIITA | 35.90 | 10.82 | 33.83 | 10.53 | 23 |
| CR002970 | CIITA | 35.40 | 15.32 | 25.50 | 10.63 | 24 |
| CR002943 | CIITA | 35.24 | 3.38 | 26.47 | 2.47 | 25 |
| CR002990 | CIITA | 35.19 | 11.07 | 24.08 | 7.77 | 26 |
| CR003003 | CIITA | 35.07 | 16.21 | 27.91 | 12.76 | 27 |
| CR002941 | CIITA | 34.89 | 4.47 | 21.77 | 3.02 | 28 |
| CR002956 | CIITA | 34.30 | 9.28 | 29.66 | 8.14 | 29 |
| CR002944 | CIITA | 34.04 | 2.10 | 22.26 | 1.09 | 30 |
| CR002945 | CIITA | 33.37 | 9.71 | 17.29 | 4.42 | 31 |
| CR002985 | CIITA | 32.99 | 11.62 | 29.52 | 10.46 | 32 |
| CR002940 | CIITA | 32.80 | 8.06 | 22.25 | 6.09 | 33 |
| CR002958 | CIITA | 32.78 | 8.06 | 22.49 | 4.77 | 34 |
| CR003009 | CIITA | 32.69 | 14.75 | 25.62 | 11.60 | 35 |
| CR003014 | CIITA | 32.51 | 14.39 | 26.93 | 11.72 | 36 |
| CR002963 | CIITA | 32.48 | 13.28 | 26.80 | 11.02 | 37 |
| CR002946 | CIITA | 31.12 | 11.15 | 14.20 | 4.24 | 38 |
| CR002959 | CIITA | 30.79 | 8.79 | 29.78 | 8.64 | 39 |
| CR002973 | CIITA | 30.60 | 11.08 | 23.55 | 8.17 | 40 |
| CR003021 | CIITA | 29.94 | 10.67 | 26.88 | 9.37 | 41 |
| CR003026 | CIITA | 29.63 | 6.59 | 20.05 | 4.52 | 42 |
| CR002968 | CIITA | 29.53 | 17.36 | 22.22 | 12.73 | 43 |
| CR003023 | CIITA | 29.38 | 7.13 | 16.83 | 3.71 | 44 |
| CR002979 | CIITA | 28.91 | 13.80 | 23.07 | 10.56 | 45 |
| CR003018 | CIITA | 27.72 | 9.36 | 26.54 | 9.18 | 46 |
| CR002987 | CIITA | 27.56 | 11.04 | 24.06 | 9.81 | 47 |
| CR003015 | CIITA | 27.40 | 7.88 | 24.05 | 6.97 | 48 |
| CR002989 | CIITA | 27.38 | 13.31 | 8.45 | 4.26 | 49 |
| CR002964 | CIITA | 26.56 | 11.21 | 19.56 | 7.74 | 50 |
| CR003010 | CIITA | 25.45 | 10.54 | 14.37 | 5.52 | 51 |
| CR002988 | CIITA | 25.29 | 13.48 | 11.35 | 5.56 | 52 |
| CR002951 | CIITA | 25.09 | 6.28 | 16.13 | 3.91 | 53 |
| CR003025 | CIITA | 24.52 | 6.66 | 19.21 | 4.70 | 54 |
| CR002996 | CIITA | 23.91 | 7.13 | 17.83 | 5.34 | 55 |
| CR003022 | CIITA | 23.73 | 11.35 | 17.96 | 8.69 | 56 |
| CR003020 | CIITA | 23.67 | 9.57 | 16.44 | 6.58 | 57 |
| CR002999 | CIITA | 23.50 | 12.38 | 18.58 | 9.69 | 58 |
| CR002939 | CIITA | 22.02 | 5.58 | 17.27 | 4.64 | 59 |
| CR003017 | CIITA | 21.90 | 4.21 | 15.22 | 2.47 | 60 |
| CR003005 | CIITA | 21.11 | 6.97 | 18.08 | 5.97 | 61 |
| CR002969 | CIITA | 20.82 | 14.36 | 14.85 | 9.88 | 62 |
| CR003024 | CIITA | 20.40 | 6.26 | 16.33 | 4.88 | 63 |
| CR003006 | CIITA | 19.46 | 9.28 | 14.66 | 6.72 | 64 |
| CR002954 | CIITA | 19.43 | 7.05 | 6.28 | 2.27 | 65 |
| CR003004 | CIITA | 19.43 | 7.68 | 15.63 | 6.01 | 66 |
| CR002975 | CIITA | 19.31 | 3.56 | 15.82 | 2.58 | 67 |
| CR002977 | CIITA | 19.11 | 9.48 | 12.99 | 6.31 | 68 |
| CR003016 | CIITA | 17.86 | 4.27 | 13.55 | 3.56 | 69 |
| CR002942 | CIITA | 17.14 | 1.59 | 8.91 | 0.97 | 70 |
| CR002950 | CIITA | 16.64 | 4.84 | 8.65 | 2.46 | 71 |
| CR002947 | CIITA | 15.86 | 4.03 | 8.10 | 2.13 | 72 |
| CR003008 | CIITA | 15.30 | 10.49 | 10.91 | 7.58 | 73 |
| CR003000 | CIITA | 12.83 | 7.31 | 10.53 | 5.76 | 74 |
| CR003002 | CIITA | 11.85 | 4.06 | 9.78 | 3.32 | 75 |
| CR003019 | CIITA | 11.80 | 2.88 | 9.74 | 2.19 | 76 |
| CR003012 | CIITA | 10.67 | 6.52 | 7.51 | 4.18 | 77 |
| CR002960 | CIITA | 10.56 | 3.88 | 6.96 | 2.14 | 78 |
| CR002982 | CIITA | 10.45 | 4.28 | 9.05 | 3.66 | 79 |
| CR002952 | CIITA | 10.37 | 4.96 | 8.22 | 4.17 | 80 |
| CR002974 | CIITA | 8.99 | 2.67 | 6.92 | 1.79 | 81 |
| CR002955 | CIITA | 7.88 | 3.56 | 5.04 | 2.25 | 82 |
| CR002998 | CIITA | 4.95 | 6.44 | 4.84 | 6.27 | 83 |
| CR002957 | CIITA | 3.73 | 0.70 | 3.15 | 0.48 | 84 |
| CR002949 | CIITA | 2.39 | 0.64 | 1.83 | 0.32 | 85 |
| CR002984 | CIITA | 2.33 | 0.18 | 2.19 | 0.17 | 86 |
| CR002986 | CIITA | 1.77 | 0.51 | 1.48 | 0.27 | 87 |
| CR002997 | CIITA | N/A | N/A | N/A | N/A | 88 |

[1513] Next, editing of the CIITA gRNA molecules with the highest Editing % was assessed in CD3+ primary human T cells, as described in Example 1. The results are shown in Table 32.

TABLE 32
% Editing and % Frameshift Edit (as measured by NGS) by dgRNA
molecules targeting CIITA delivered as RNP to CD3+ T cells

| | CD3+ NGS | | | |
|---|---|---|---|---|
| Targeting | | Edit % Std. | Frameshift | Frameshift |
| Domain ID | Editing % | Dev. | Edit % | % Std. Dev. |
| CR002948 | 41.6 | 2.3 | 33.6 | 1.7 |
| CR003001 | 36.3 | 1.8 | 32.0 | 1.3 |
| CR002991 | 33.9 | 3.4 | 29.2 | 3.3 |
| CR002993 | 33.8 | 2.6 | 27.2 | 1.7 |
| CR003007 | 31.6 | 1.6 | 28.8 | 1.7 |
| CR002961 | 30.3 | 2.0 | 24.7 | 1.2 |
| CR002965 | 29.0 | 3.9 | 24.4 | 3.2 |
| CR002967 | 28.0 | 0.7 | 25.6 | 0.5 |
| CR002972 | 26.6 | 1.1 | 20.9 | 1.9 |
| CR002994 | 22.0 | 2.7 | 18.1 | 2.3 |
| CR002992 | 16.0 | 1.6 | 11.6 | 0.8 |
| CR003013 | 11.5 | 0.9 | 9.0 | 0.6 |
| CR002971 | 7.2 | 0.7 | 5.4 | 0.4 |
| CR002980 | 6.1 | 0.5 | 3.6 | 0.6 |
| CR003011 | 5.2 | 0.6 | 4.9 | 0.6 |
| CR002953 | 5.1 | 0.7 | 4.8 | 0.7 |
| CR002978 | 4.7 | 0.7 | 2.7 | 0.2 |
| CR002976 | 4.0 | 0.3 | 3.6 | 0.3 |
| CR002962 | 3.4 | 0.4 | 2.9 | 0.4 |
| CR002995 | 3.1 | 0.2 | 2.5 | 0.4 |

[1514] Next, editing, and loss of MHC class II molecule expression, in response to a subset of gRNA molecules targeting CIITA was assessed in primary human T cells. Briefly, primary human T cells were prepared in culture and activated using CD3/CD28 bead stimulation (DynaBeads Invitrogen Cat #111.41D) at bead to cell ratio of 3:1. At day 2, RNP consisting of S. pyogenes Cas9 precomplexed with dgRNA molecules (using the crRNA and tracr sequences described above) comprising the indicated targeting domains were electroporated into the T cells using the Neon electroporator at three different concentrations of RNP (0.3 uM, 1.0 uM and 3.0 uM; diluted after formation of RNP). On Day 5 and Day 7, % editing was assessed by loss of expression of HLA-DR, as assessed by flow cytometry. The results from Day 5 and Day 7 were comparable. % editing in T cells (e.g., % of cells which are CD3+ and HLA-DR−) at day 5 is shown in FIG. 37. As shown, at the highest concentration tested, RNP that included dgRNA molecules CR02991, CR02993 and CR03007 each resulted in >50% editing, as measured by loss of HLA-DR surface staining. As shown below, the lack of editing observed for gRNA CR002961 was due to a mistake in the experimental protocol. When the experiment was repeated (data shown in FIG. 39), RNP comprising gRNA CR002961 resulted in dose-responsive levels of reduction of HLA-DR expression.

[1515] The experiments described above were repeated for another set of gRNA molecules targeting CIITA. FIG. 38 shows the results of this experiment, with genomic editing of the CIITA locus resulting from human primary T cell electroporation with RNP containing the indicated gRNA targeting the CIITA locus. The frequency of insertions or deletions is indicated (% indels) and the percentage of these edits that result in frameshifting of the coding sequence is shown (% frameshift edits). The top 5 most frequently observed sequence changes are shown in detail in the bottom panel. These data indicate that gRNAs targeting CIITA are able to achieve >90% editing with up to 74% frameshift editing in primary human T cells.

[1516] The experiment was again performed using a third set of grNAs targeting CIITA at various concentrations of RNP. FIG. 39 shows the % editing at Day 3 post electroporation in primary human T cells by RNPs that include the indicated dgRNA to CIITA (number indicates CR00xxxx identifier of targeting domain) at the indicated concentration, as measured by flow cytometry using an anti-HLA-DR reagent. % editing represents the expression of HLA-DR at the cell surface in cells electroporated with CIITA guide relative to the expression in cells electroporated without guide RNA. As mentioned above, activity of gRNA CR002961 was confirmed in this experiment. FIG. 40 shows the frequency of insertions or deletions is indicated (% indels) and the percentage of these edits that result in frameshifting of the coding sequence is shown (% frameshift edits). These data indicate that another set of gRNAs targeting CIITA is identified which are able to achieve >85% editing with up to 87% frameshift editing (CR002967) in primary human T cells. The top 5 most frequently observed sequence changes for each CIITA targeting gRNA used for primary human T cell editing are shown in FIG. 41.

[1517] The experiment was again performed using a different set of gRNAs targeting CIITA, and compared to the highest performing gRNA (CR0002967) from the previous experiment. FIG. 42 shows the results of % editing at Day 3 post electroporation in primary human T cells by RNPs that include the indicated dgRNA to CIITA (number indicates CR00xxxx identifier of targeting domain) at the indicated concentration, as measured by flow cytometry using an anti-HLA-DR reagent. FIG. 42 shows the frequency of insertions or deletions is indicated (% indels) and the percentage of these edits that result in frameshifting of the coding sequence (% frameshift edits) when these gRNAs are used. FIG. 44 shows the top 5 most frequently observed sequence changes (indels) for each of these CIITA targeting gRNA in primary human T cells. These data confirm the high editing/frameshift/loss of HLA-DR for RNP comprising dgRNA CR002967 and additionally identify other CIITA-targeted gRNAs which result in high editing (>900) and high frameshift mutations (>80) in primary human T cells.

### Example 11: Editing of TCR (TRAC) and B2M in BCMA CAR T Cells

TABLE 25
Reagents used for flow cytometry

| | Catalog | | Nick | |
|---|---|---|---|---|
| Name | Number | Company | name | Clone |
| R-PE | 016-110-084 | Jackson | SAPE | |
| Strepetavidin | | Immuno | | |
| | | Research | | |
| Streptavidin | 47-43-17-82 | ebiosciences | SA-APC- | |
| APC-eFluor780 | | | e780 | |
| APC-Anti Hum | 316312 | Biolegend | B2M-APC | |
| B2Microglobulin | | | | |
| PerCP-Cyanine5.5 | 45-0037-42 | ebiosciences | CD3 | OKT3 |
| Anti human | | | | |
| CD3 | | | PerCPcy5.5 | |
| Anti Human | 17-0087-42 | ebiosciences | CD8 APC | SK1 |
| CD8a APC | | | | |
| Anti Human CD8a | 300920 | Biolegend | CD8 Af700 | |
| Alexafluor700 | | | | |
| Anti Human HLA- | 48-9956-42 | ebiosciences | HLA-DR | LN3 |
| DR efluor 450 | | | V450 | |
| Anti Human CD8a | 48-0086-42 | ebiosciences | CD8 V450 | OKT8 |
| eFluor 450 | | | | |
| Anti Human CD4 | 48-0047-42 | ebiosciences | CD4 V450 | SK3 |
| eFluor 450 | | | | |
| Fixable | 65-0865-14 | ebiosciences | L/D e780 | |
| Viability Dye | | | | |
| eFlour780 | | | | |

TABLE 26
T cell media components

| Component | Invitrogen Catalog # | Concentration |
|---|---|---|
| RPMI 1640 | 22400-089 | |
| FBS | 16140 | 10% final |
| L-glutamine | 25030-081 | 200 mM (100x stock) |
| Non-essential amino acids | 11140-050 | 10 mM (100x stock) |
| Sodium pyruvate | 11360-070 | 100 mM (100x stock) |
| HEPES buffer | 15630-080 | 1M (100x stock) |
| 2-mercaptoethanol | 21985-023 | 55 mM (1000x stock) |

[1518] Editing of allogeneic T cell targets in T cells engineered to express a BCMA CART, and the function of edited cells was assessed. T cells, including TCR−B2M−/BCMA CAR+ T cells, used in these experiments were prepared as described schematically in FIG. 27. Briefly, PBMC were isolated from human blood by using centrifugation method using Ficoll. Total T cells were isolated from these PBMC's (Hemacare) using human Pan T Cell Isolation Kit (Miltenyi Biotec #130-096-535). These cells were aliquoted and frozen using CRYOSTOR CS10 media (Biolife Solution-210102), and stored in liquid nitrogen. These frozen cell aliquots were then thawed in a 37 degree waterbath for 20 seconds and then transferred to a 50 ml conical tube with 10 ml of prewarmed T cell media and centrifuged at 300 rpm for 5-10 mins at 24 degrees to remove the freezing media and resuspended with prewarmed T cell media. Cells were then transferred to a 24-well dish and activated by adding CD3/CD28 beads (DynaBeads Invitrogen Cat #111.41D) at bead to cell ratio of 3:1. Day 1 post activation, lentivirus comprising sequence encoding CAR BCMA-13 (139112 from Table 23, above) was transduced into these cells at a multiplicity of infection (MOI) of 5. UTD (untransduced cells) were not treated with virus. Day 4 post activation, 250,000 cells per condition either CAR BCMA-13 or Untransduced T cells were then electroporated with RNP using BTX (settings: 1000V/0.6 ms/1 pulse) with or without guide RNA as indicated. For RNP generation, dgRNA molecules comprising tracr RNA and crRNA for TRAC and B2M were heated together at 95° C. for 2 minutes and gradually were cooled to come to room temperature, upon which they were incubated with Cas9 Protein and 5×CCE buffer for 10 mins at 37° C. For TRAC editing the targeting domain of CR000985 (Sequence: CCGAAUCCUCCUCCUGAAAG (SEQ ID NO: 5593)) was used, and for B2M editing the targeting domain of CR000442 (Sequence: GGCCACGGAGCGAGACAUCU (SEQ ID NO: 5496)) was used. In each case, dgRNA were used with the crRNA sequence: [targeting domain]-GUUUUAGAGCUAUGCUGUUUUG (SEQ ID NO: 6607), and the tracr sequence: AACAGCAUAGCAAGUUAAAAUAAGGCUAGUCCGUUAUCAACUUGAAAAAGUGGCACCGA GUCGGUGCUUUUUUU (SEQ ID NO: 6660). After electroporation cells were returned to 0.5 ml of T cell media in a 24 well plate. Two days after electroporation, cells were split every other day to maintain cells at 0.5 million/ml. Five days post electroporation, 100,000 cells were analyzed by flow cytometry (BD Fortessa) using FlowJo software. 100,000 cells were aliquoted to each well of round bottom 96 welled plate. Cells were taken from each sample, pipetted to dissociate them from beads, and beads were removed by using 96 welled plate magnet, and centrifuged with 100 ul of FACS buffer (Miltenyi MACS buffer catalog #130-092-987 with 0.5% BSA (Miltenyi-catalog #130-091-376) to wash the cells. Cells were then incubated with different antibodies diluted in 100 ul FACS buffer for 30 mins on ice. Cells were then washed two times with 200 ul of FACS buffer. Cells were then resuspended in 150 ul of FACS buffer and run on 5 laser Fortessa flow cytometer (Becton Dickenson). Expression of TCR was detected by using anti-CD3-PercpCy5.5 (Ebiosciences 45-0037-42) and expression of B2M was detected by using anti-B2M-APC (316312 Biolegend). Cell surface expression of CAR was evaluated by staining with Biotinylated Protein L followed by Streptavidin-PE (016-110-084 Jackson Immuno Research). T cells were detected by staining CD4 using anti-CD4-V450 (48-0047-42 Ebiosciences) or CD8 using anti-CD8-alexa700 (300920 Biolegend). Expression of TCR (using anti-CD3-PercpCy5.5) and B2M (using anti-B2M-APC) is shown in FIG. 28. T-cells transduced with BCMA CAR BCMA-13 are indicated as “CAR”. Untransduced cells are indicated as “UTD”. Cells electroporated with Cas9 but no guide RNA are indicated as “no guide”. CD4 staining using anti-CD4-V450 is shown in the lower panels of FIG. 28 to verify that the loss of CD3 staining is due to loss of the TCR and not due to loss of T-cells. These results demonstrate that simultaneous introduction of CRISPR systems to B2M and TRAC can be used to generate a population of T cells which lack TCR expression and B2M expression in high yield, with 72% of T cell in the CAR-transduced set staining negative for both TCR and B2M. Next, the editing of TRAC and B2M was evaluated in the CAR+ subset of cells assessed in FIG. 28. The results are shown in FIG. 29. Briefly, the cells from FIG. 28 were analyzed by gating for CAR+ cells (stained using Biotinylated Protein L followed by Streptavidin-PE) for the left-hand panel or without CAR gating (total T-cells; right panel). Editing levels are similar in the CAR+ and total T-cell populations, indicating that CAR expression did not have an effect on editing efficiency.

[1519] Next, the cells from FIG. 28 were analyzed for CAR expression by analyzing the PE channel. As shown in FIG. 30, the percentage of CAR positive cells was similar in the cells receiving guide RNAs (TRAC and B2M) and those that did not (no guide), indicating that TCR and B2M editing did not have an effect on CAR expression. UTD indicates untransduced cells. CAR indicates cells that were transduced with BCMA CAR.

[1520] Next, the ability of T cells to proliferate in response to BCMA (the target antigen of the CAR molecule) was assessed. Briefly, cells were prepared as described above, were thawed and co-cultured with target cells expressing BCMA (KMS11 (high), RPMI8226 (low)) or not expressing BCMA (Nalm6). T-cells transduced with CAR BCMA-13 are indicated as “BCMA CAR”. Untransduced cells are indicated as “UTD”. Cells electroporated with Cas9 but no guide RNA are indicated as “no guide”. Cells electroporated with RNP containing B2M and TCR guides are indicated as “B2M+TCR”. 25,000 irradiated target tumor cells were co-cultured with T cells at 1:1 ratio for 4 days followed by flow cytometry analysis. The number of T-cells (stained with anti-CD4-V450 and anti-CD8-alexa700) was determined by the number of CD4+ plus CD8+ cells relative to 3000 counting beads (Life technology, Catalog #C36950). As shown in FIG. 31, both populations of cells transduced with BCMA CAR lentivirus exhibited proliferation in response to both BCMA-expressing cell types, with the population of cells receiving RNPs containing B2M and TRAC-targeting gRNA molecules exhibiting higher T cell counts after 4 days of co-culture. As shown in FIG. 32, when proliferation of CAR+CD4+ and/or CD8+ T cells was assessed separately, results were similar, with CAR+ (gated by staining with biotinylated Protein L followed by Streptavidin-APC-efluor780) T cells proliferating in response to both BCMA-expressing cell types. The foregoing written specification is considered to be sufficient to enable one skilled in the art to practice the invention.

### Example 12: Analysis of RNP Concentration Effects and Indel Patterns Using RNPs Targeting TCR or B2M, and Generation of CIITA−/B2M−/TCR− CAR T Cells

### Methods

[1521] PBMC were isolated from human blood (Hemacare) by using centrifugation method using Ficoll. Total T cells were isolated from these PBMC's using human Pan T Cell Isolation Kit (Miltenyi Biotec #130-096-535). These cells were aliquoted and frozen. These frozen cell aliquots were then thawed and activated using CD3/CD28 beads (DynaBeads Invitrogen Cat #111.41D) at bead to cell ratio of 3:1. On day 2 or day 3 after bead activation, 200,000 cells were removed from culture for electroporation. RNP complex used for T cell genome editing was formed using a 1:2 molar ratio of Cas9 protein to RNA (crRNA and tracRNA). 100 μM crRNA and 100 μM tracrRNA were denatured separately at 95° C. for 2 min and cooled to room temperature. In a final volume of 5 μL, 1.4 μL of Cas9 protein at a concentration of 5.9 μg/μL (NLS-Cas9-NLS) was mixed with 1.6 μL of Cas9 buffer (20 mM Tris, pH8.0; 200 mM KCL, 10 mM MgCL2) and mixed with 1 μL of 100 μM tracrRNA at room temperature. Next 1 μL of 100 μM crRNA was added, mixed and incubated for 10 min at 37° C. If more than one RNP was added during the electroporation step, each RNP with a crRNA targeting a different gene was assembled separately using the above method, then combined together with the addition of Cas9 buffer in order to obtain different RNP final concentrations for different conditions. For “triple editing”, i.e. simultaneous addition of 3 RNPs targeting different genes, details of RNP quantities are provided in the figures. The assembled RNPs were then mixed with 200,000 cells in 10 ul of T Buffer (neon transfection system 10 ul Kit). Electroporation was performed by Neon electroporator using Neon® Transfection System 10 μL Kit (MPK1096) at 1600V, 10 ms, 3 pulses. For CIITA, editing was quantitated by measuring loss of cell surface expression of HLA-DR by flow cytometry 3 days after electroporation. Cells were stained with anti-CD3 (PerCP-Cy5.5), anti-HLA-DR-V450, and a live/dead cell dye e780(APC-Cy7) and analyzed by flow cytometry. Editing of TRAC was quantitated by measuring loss of cell surface expression of CD3 epsilon by flow cytometry 3 days after electroporation using anti-CD3 antibody (PerCP-Cy5.5). Editing of B2M was measured by loss of cell surface expression using flow cytometry 4 days after electroporation using anti-B2M antibody-APC (316312 Biolegend). To evaluate the editing frequency and sequence changes resulting from gene editing in the above prepared T cells, genomic DNA was isolated and subjected to sequencing. Briefly, frozen cell pellets were thawed and processed using DNeasy Blood & Tissue Kit (Qiagen, 69506) to isolate genomic DNA. Eluted DNA was used to run PCR using Titanium Taq PCR kit (Clontech Laboratories, 639211) and primers in Table 27.

TABLE 27
primer design for PCR.

| | | SEQ ID | | SEQ ID |
|---|---|---|---|---|
| Target | Forward Primer | NO: | Reverse Primer | NO: |
| B2M | GCACGCGTTTAATA | 10819 | GACCCTCCCGTCGCC | 10832 |
| | TAAGTGGAGG | | | |
| FKBP12 | CCTCATCTGTGCAG | 10820 | CGAGGTACTAGGCAG | 10833 |
| | CGGGCAT | | AGCCGTGG | |
| TRAC (guides | CATCACGAGCAGCT | 10821 | GGACTGCCAGAACA | 10834 |
| CR000961, | GGTTTC | | AGGCTC | |
| CR000978) | | | | |
| TRAC (guides | GAGCCGAGGTATC | 10822 | ATTCAGGAGAGACCC | 10835 |
| CR000979) | GGTCCTG | | CACCC | |
| TRAC guides | TGTTTGTAAGGGGA | 10823 | GTTTCAGGCCATTAT | 10836 |
| (CR000984, | TATGCACAGA | | TATTGCACA | |
| CR000991, | | | | |
| CR000992, | | | | |
| CR000993) | | | | |
| CIITA (guides | TGTTGTAGGTGTCA | 10824 | AATTTCCCCTGATTG | 10837 |
| CR002961, | ATTTTCTGCC | | CCGTCTCTA | |
| CR002967) | | | | |
| CIITA (Guide | CCCTCTTTCCAGAA | 10825 | GACTGACGTGGCTCA | 10838 |
| CR002991) | ATTTCCTTCTTC | | TGATGAAT | |
| CIITA (Guide | AATAGAGACTCAC | 10826 | GTACATTTTAAGGCT | 10839 |
| CR003007) | CTTGGGCTTTC | | CCTGTTGGC | |
| CIITA (Guide | GCCTTCAGTTAGAC | 10827 | GAGTCTCTATTGTAC | 10840 |
| CR003001) | CTTGTTGATT | | CCACCTTGG | |
| CIITA (Guide | TCCTTCTTCATCCA | 10828 | CCCTTGCAATGATTT | 10841 |
| CR002994) | AGGGACTTTT | | CTGTGGG | |
| CIITA (Guide | TTCTTCATCCAAGG | 10829 | GACTGACGTGGCTCA | 10842 |
| CR002992, | GACTTTTCCT | | TGATGAAT | |
| CR002993) | | | | |
| CIITA (Guide | TGTTGTAGGTGTCA | 10830 | AATTTCCCCTGATTG | 10843 |
| CR002961, | ATTTTCTGCC | | CCGTCTCTA | |
| CR002967, | | | | |
| CR002965) | | | | |
| CIITA (Guide | TGTAGGTGTCAATT | 10831 | GAATTTCCCCTGATT | 10844 |
| CR002972, | TTCTGCCTCT | | GCCGTCT | |
| CR002980, | | | | |
| CR002976) | | | | |

[1522] PCR product was purified using QIAquick PCR Purification Kit (Qiagen, 28104). Purified PCR product was then used for T7 E1 assay to detect base pair mismatches and confirm gene editing. PCR amplicons were subjected to standard Nextera NGS library prep (Illumina) and sequenced with paired-end reads on an Illumina MiSeq sequencer. Sequencing reads were aligned to the reference genome and variants were called.

### Results

[1523] First, gRNAs targeting TRAC were evaluated for effects on cell surface TCR expression at various concentrations of Cas9 (RNP). Human primary T cells were electroporated on day 3 after CD3/CD28 bead activation with RNPs at the indicated concentrations (uM) containing the indicated gRNAs in dual guide format. Additional guide numbers indicate CRxxxxx identifier of targeting domain of the gRNA. Loss of TCR expression was evaluated by staining with anti-CD3 antibody and analysis by flow cytometry 3 days after electroporation (CD3 KO T cells (%). FIG. 33A shows lss of CD3 staining upon electroporation of RNPs containing guides CR000961 (961), CR000978 (978), CR000984 (984), CR000992 (992), CR000985 (985), and CR000960 (gRNA1) and CR000979 (gRNA8). These data show that nearly maximal editing (as shown by loss of CD3 staining) is achieved for RNPs with CR000961 and CR000984-containing gRNAs at RNP concentrations of between 0.2 and 0.3 uM. Other gRNAs achieved maximal editing at concentrations of 1 uM. FIG. 33B shows loss of CD3 staining upon electroporation of RNPs containing guides CR000991 (991), CR000992 (992), CR000993 (993), and CR000978 (978). 991 and 992 are nearly superimposable. Here again, for RNP containing gRNAs 991, 992 and 993, maximum editing was observed at RNP concentrations of 0.3 uM, while gRNA 978% editing continued to increase up to 1.1 uM. As shown in FIG. 33C, electroporate of T cells with gRNA targeting the TRAC locus results in high levels of indel formation at the targeted sites (up to 97% editing) and high levels of frameshift mutations, which are predicted to result in loss of protein expression (up to 78%).

[1524] Next, the mutations (indels) at each targeted locus were assessed by next generation sequencing. FIG. 34A and FIG. 34B show the top 5 most frequently observed sequence changes for each TRAC targeting dgRNA used for primary human T cell editing. Figures A and B are the outcome from 2 independently performed electroporation experiments. Data are the average from triplicate PCR products. These data show consistent patterns of editing across multiple experiments when the same gRNA format and RNP are used, in with the same delivery technique.

[1525] Next, similar experiments were performed with gRNAs (dual guide format) targeting B2M. The effect of RNP concentration was first assessed. Human primary T cells were electroporated on day 2 after CD3/CD28 bead activation with RNPs at the indicated concentrations containing the indicated gRNAs. Guide numbers indicate CR00xxx identifier of targeting domain. Loss of B2M expression was evaluated by staining with anti-B2M antibody and analysis by flow cytometry 4 days after electroporation (B2M negative cells). The results are reported in FIG. 35, and demonstrate that >85% editing (as assayed by loss of B2M surface expression) was achieved by gRNA 442 at 0.2 uM, and at slightly higher RNP concentration (0.4 uM) for gRNA 442 and 455. As shown in FIG. 36, RNPs comprising gRNAs CR000444 and CR000455 result in high levels of editing and high levels of frameshift editing in primary human T cells. Top ten indels produced by each gRNA are shown in the lower panel. Data are the average from triplicate PCR products.

[1526] Next, the simultaneous editing of TCR, B2M and CIITA was performed in CART cells, and the function of such CART cells was assessed. FIG. 45 shows the schematic protocol that was followed for these experiments for preparation of primary human T cells edited at the B2M, TRAC, and CIITA loci (triple edited cells). FIG. 46 shows the % loss of cell surface expression of CD3 epsilon, B2M, and HLA-DR, respectively, by flow cytometry (as indicators of editing at TRAC, B2M and CIITA, respectively). As expected, cells electroporated with only single gRNA showed loss of only the expected protein. In cells treated with 3 RNPs, each containing a gRNA to a different target, cells from each population exhibited over 80% loss of each of the target proteins, as well as >80% loss of both B2M and TRAC, with the exception of the lowest concentration of the CIITA-targeting gRNA (triple 4), which resulted in a lower loss of HLA-DR than when higher concentrations of this RNP are delivered to the cells. FIG. 47 shows the genomic editing of the B2M, TRAC, and CIITA loci resulting from human primary T cell simultaneous electroporation with 3 RNPs containing gRNAs targeting the B2M, TRAC, and CIITA loci. The frequency of insertions or deletions is indicated (% indels) and the percentage of these edits that result in frameshifting of the coding sequence is shown in parentheses. FIG. 48, FIG. 49 and FIG. 50 show the top 10 most frequently observed sequence changes at the B2M locus (in response to gRNA comprising CR000442), the TRAC locus (in response to gRNA comprising CR000961) and at the CIITA locus (in response to gRNA comprising CR002991), respectively, in primary human T cells in the context of simultaneous editing of 3 loci (triple editing) with different concentrations of each RNP as shown in the schematic in FIG. 45. These data indicate that the efficient gRNA molecules used here efficiently knock out TRAC, CIITA and B2M in primary human T cells to with high efficiencies, and result in T cells which have reduced graft versus host disease capability (via loss of TCR) and reduced host versus graft disease capability (through loss of both B2M and CIITA), representing an important step toward an allogenic, off-the-shelf T cell product.

[1527] Next, the effects of the format of the gRNA molecule was assessed. Guide RNAs against TRAC (comprising the targeting domain of CR000961; upper panel) or B2M (comprising the targeting domain of CR00442; lower panel) were synthesized in the single guide or dual guide format with or without the indicated chemical modifications (PS (3 nt at both 5′ and 3′ ends are phosphorothioate) or OMePS (3 nt at both 5′ and 3′ ends are 2′-OMe and phosphorothioate); for dual guide RNA, both the crRNA and the tracr RNA comprised the modifications). RNPs were electroporated into human primary T cells at the indicated concentrations. FIG. 51 shows the results of these experiments: editing efficiency was evaluated by analysis of cell surface staining of CD3 epsilon for TRAC editing (upper) and B2M protein for B2M editing (lower) by flow cytometry. As shown in FIG. 51, all formats were capable of achieving high efficiency editing at RNP concentration of 1 uM, however, sgRNA format was able to maintain high editing efficiencies at lower concentrations than dgRNA formats (down to 0.04 uM for gRNAs comprising the targeting domain of CR000961, and down to 0.1 uM for gRNAs comprising the targeting domain of CR000442). For the TRAC-targeting gRNA, chemical modification had no effect on editing efficiency at the rNP concentrations tested. For the B2M-targeting gRNA, chemical modification of the sgRNAs had an effect on editing efficiency at the lowest concentration tested, with the PS-modified sgRNA having the highest editing efficiency at 0.04 uM RNP concentration.

### Example 13: T Cell Resistance to Immunosuppression after Genome Editing of FKBP1A, and Functional Assessment of TCR−/FKBP12− CART Cells

[1528] Without being bound by theory, as described herein, it is believed that another strategy for generating off-the-shelf (“universal”) CART cells is to reduce or eliminate expression of TCR (to, e.g., reduce or suppress graft versus host disease), and also to reduce or eliminate expression of a target of an immunosuppressive agent (e.g., an mTor inhibitor). Subsequent treatment of a patient with such genome edited CART cells in combination with said immunosuppressive agent will inhibit the host immune response (e.g., thereby inhibiting host versus graft responses) without inhibiting the function of the CART cell (e.g., the antitumor function of the CART cell). Towards that end, function of T cells edited to make them TCR− and FKBP12− were assayed, including in the presence of the mTor inhibitor RAD001.

### Methods:

[1529] After thawing, isolated human T cells were activated with CD3/CD28 beads for 3 days at a bead to cell ratio of 3:1. Cells were then electroporated with RNP containing dual guide RNA molecules (as indicated, as described above in these examples), and Cas9 protein using the Neon instrument with the 100 ul tip kit. RNPs were prepared in the following manner. crRNA and trRNA (10 ul of each at 100 uM) were heated in separate tubes to 95 degrees C. for two minutes and then cooled for 5 minutes at room temperature. Cas9 protein (1.5 mg/ml), 20 uM trRNA, and 20 uM crRNA and 17 ul of buffer (20 mM Tris, PH8.0, 200 nM KCl, 10 mM MgCI2) were combined in a total of 50 ul volume and incubated at 37 degrees for 10 minutes. The RNP was then mixed with 100 ul of cells at a cell count of 2 million cells per ml of T buffer (Invitrogen; Cat #: MPK1096). 100 ul of cells mixed with RNP was transferred to the Neon pipette tip and electroporated at 1600V, 10 ms, 3 pulses. The RNP was at a final concentration of 3.3 uM as a measure of Cas9 protein.

[1530] After electroporation, cells were then transferred into a 6-well plate with 2 ml of T cell media with beads at a 3:1 bead to cell ratio. Fresh media was added every other day. On day 4 after electroporation, cells were debeaded and re-plated at a density of 0.5 million per well in a 96-well plate with 100 ul of media and fresh beads were added at a bead to cell ratio of 1:1 for 2 hours. To determine the functional effects of FKBP1A editing, cells were then treated with or without 2.5 nM RAD001 (as indicated) for 3 hours. The phosphorylation of S6 was detected by flow cytometry, and was used as an indication of immunosuppressing by RAD001. For preparation of samples for flow cytometry, cells were spun down and washed with FACS buffer (MACS running buffer+0.5% sBSA), the stained with Dead/live stain (Zombie violet fixable viability kit, Biolegend, Catalog #423114) for 10 minutes. Cells were then washed with FACS buffer and fixed overnight with Cytofix/Cytoperm solution (Becton Dickenson, Catalog #554714). Cells were then washed twice with PBS and permeabilized with Cytofix/Cytoperm solution (Becton Dickenson, Catalog #554714) for 20 minutes. Cells were then washed twice with PBS and incubated with PE conjugated anti-phospho-S6 antibody (phospho-S6 ribosomal protein Ser240/244 (D68F8) Rabbit mAb, Cell Signaling Technologies, Catalog #14236) for 1 hour at 4 degrees. Cells were then washed twice with PBS and analyzed by flow cytometry on the Becton Dickenson LSR Fortessa using FloJo-V10 software.

[1531] FIG. 54 shows the results of S6 phosphorylation in the presence or absence of mTor inhibitor RAD001 after exposure to gRNA targeted towards FKBP1A. T cells were edited with RNPs containing guide sequences targeting FKBP1A (CR002086, CR002097, CR002122; indicated as 2086, 2097, and 2112, respectively) or with negative controls: 442 (an irrelevant guide CR00442 targeting B2M); Cas9 (Cas9 alone with no trRNA or crRNA); trRNA (tracer RNA, but no crRNA or Cas9 protein); Cas9+trRNA (Cas9 and tracer RNA but no crRNA); EP (cells only with electroporation); no EP (cells only with no electroporation). After electroporation cells were treated with 2.5 nM RAD001 (upper panel) or left untreated (lower panel) and the impact on mTOR pathway inhibition was evaluated by analyzing S6 phosphorylation (pS6) by flow cytometry. The Y-axis indicates forward scatter (FSC) and the X-axis indicates the level of pS6. Positive staining for pS6 (shown in the gating trace) was determined by gating above the fluorescence level seen in a control stained with isotype antibody (not shown). Quantitation of S6 phosphorylation from the flow cytometry data is shown in the graph in the lower panel. These data demonstrate that editing of FKBP1A (and subsequence loss of FKBP12 protein) renders primary T cells refractory to the inhibitory effects of the rapalog RAD001.

[1532] Next, CART cells were generated which are TCR negative and FKBP12 negative, and their function evaluated. Briefly, PBMC were isolated from human blood by using centrifugation method using Ficoll. Total T cells were isolated from these PBMC's using human Pan T Cell Isolation Kit (Miltenyi Biotec #130-096-535). These cells were aliquoted and frozen. These frozen cell aliquots were then thawed and activated using CD3/CD28 beads (DynaBeads Invitrogen Cat #111.41D) at bead to cell ratio of 3:1. Day 1 post activation, CAR BCMA-10 or CAR-CD19 (CTL019) virus was used to transduce these cells at MOI of 5. UTD (untransduced cells) were not treated with virus. Day 4 post activation, either CAR BCMA-10 or CAR-CD19 or untransduced T cells were then electroporated with RNP with the indicated guide RNAs or without guide RNA (no guide) as indicated using Neon electroporator. RNP were prepared as described above. For TRAC editing, CR000961 was used (indicated as 961) alone or with guides targeting FKBP1A as indicated. For FKBP1A editing CR0002097 (indicated as 2097) or CR002097 and CR002086 together (indicated as 2097+2086) was used. The RNP (or RNPs) was then mixed with 100 ul of cells at a cell count of 2 million cells per ml of T buffer (Invitrogen; Cat #: MPK1096). 100 ul of cells mixed with RNP was transferred to the Neon pipette tip and electroporated at 1600V, 10 ms, 3 pulses. The RNP was at a final concentration of 3.3 uM as a measure of Cas9 protein. After electroporation, cells were then transferred into a 6-well plate with 2 ml of T cell media with beads at a 3:1 bead to cell ratio. Fresh media was added every other day. Five days after electroporation, 500,000 cells (for phosphor-S6 staining) or 50,000 cells for cell surface marker staining (eg CD3) were removed from culture and analyzed by flow cytometry (BD Fortessa) using FlowJo software. Expression of TCR was detected by using anti-CD3-PercpCy5.5 (Ebiosciences 45-0037-42). Cell surface expression of CAR was evaluated by staining with Biotinylated Protein L followed by Streptavidin-PE (016-110-084 Jackson Immuno Research). T cells were detected by staining CD4 using anti-CD4-V450 (48-0047-42 Ebiosciences) or CD8 using anti-CD8-APC (17-0087-42 eBiosciences).

[1533] To determine the functional effects of FKBP1A editing, on day 4 after electroporation, cells were debeaded and re-plated at a density of 0.5 million per well in a 96-well plate with 100 ul of T cell media and fresh beads were added at a bead to cell ratio of 1:1 for 2 hours. Cells were then treated with or without 2.5 nM RAD001 (as indicated) for 3 hours. The phosphorylation of S6 was detected by flow cytometry. For preparation of samples for flow cytometry, cells were spun down and washed with FACS buffer (MACS running buffer+0.5% sBSA), the stained with Dead/live stain (Zombie violet fixable viability kit, Biolegend, Catalog #423114) for 10 minutes. Cells were then washed with FACS buffer and fixed overnight with Cytofix/Cytoperm solution (Becton Dickenson, Catalog #554714). Cells were then washed twice with PBS and permeabilized with Cytofix/Cytoperm solution (Becton Dickenson, Catalog #554714) for 20 minutes. Cells were then washed twice with PBS and incubated with PE conjugated anti-phospho-S6 antibody (phospho-S6 ribosomal protein Ser240/244 (D68F8) Rabbit mAb, Cell Signaling Technologies, Catalog #14236) for 1 hour at 4 degrees. Cells were then washed twice with PBS and analyzed by flow cytometry on the Becton Dickenson LSR Fortessa using FloJo-V10 software.

[1534] To test the cytokine release from edited CART cells, effector cells (edited/unedited CART or untransduced cells) were thawed in media (RPMI, 5% FCS, 10 mM Hepes, 1× Pen/Strep, 1× Glutamine) on the day of the assay and counted on Cellometer (Nexelcom). These cells were then co-cultured with 30,000 target cells expressing BCMA (KMS11, RPMI8226) or cells expressing CD19 (Nalm6) at Effector:Target ratio of 1:1. 100 ul of co-culture supernatant was harvested after 20 hours. These supernatants were then used measure the cytokines IL-2 and IFN-gamma released using Meso Scale Discovery, Proinflammatory Panel 1 catalog #N05049A-1 system according to the manufacturer's protocol.

[1535] To measure the cytolytic capacity of effector cells (edited/unedited CART or untransduced cells), cells were thawed in media (RPMI, 5% FCS, 10 mM Hepes, 1× Pen/Strep, 1× Glutamine) on the day of the assay and counted on Cellometer (Nexelcom). These cells were then co-cultured for 20 hours with 30,000 target cells stably expressing the luciferase reporter gene and expressing BCMA (KMS11, RPMI8226) or cells expressing CD19 (Nalm6) at Effector:Target ratio of 1:1 in a 96 well assay plate black with clear bottom (Costar, cat #3904). Luciferase signal was measured using Bright-Glo substrate (Promega, Ref #E263B) on the EnVision multiple plate reader instrument from Perkin Elmer. Cell killing was inferred from the decrease in luciferase signal and was calculated as follows:

Target cell killing (%)=100−(sample luminescence/average maximal luminescence)*100

[1536] For the T cell proliferation assay, cells prepared as above were thawed and co-cultured with target cells expressing BCMA (KMS11, RPMI8226) or cells expressing CD19 (Nalm6). Irradiated target tumor cells were co-cultured with edited or unedited CART cells at an effector to target ratio of 1:1 for 4 days followed sample staining for CD4, CD8, and CAR as above and flow cytometry analysis Becton Dickenson LSR Fortessa and analyzed with FloJo-V10 software. The number of T-cells (stained with anti-CD4-V450 and anti-CD8-APC) was determined by the number of CD4+ plus CD8+ cells relative to 3000 counting beads (Life technology, Catalog #C36950). The number of CAR+ T cells was determined by gating the CAR+ cell population (stained with Biotinylated Protein L followed by Streptavidin-PE).

### Results:

[1537] Cytokine production by CART cells in response to antigen exposure was determined. Gene editing was performed on CART cells using the CR000961 guide to target the TRAC locus and/or the CR002097 and CR002086 guides to target the FKBP1A locus (as indicated by cr961, 2097, and 2086, respectively). FIGS. 55A and 55B show interferon gamma release and IL-2 release, respectively, from edited/unedited CART cells. These data indicate that loss of FKBP12 and/or TCR through gene editing does not impair cytokine production in activated CART cells. FIG. 56 shows the killing of antigen positive cancer cell lines by edited and unedited CART cells. These data indicate that loss of FKBP12 and/or TCR through gene editing does not impair the target cell killing capacity of CART cells. FIG. 57 shows proliferation of edited and unedited CART cells in response to antigen exposure. These data indicate that loss of FKBP12 through gene editing does not impair the proliferation capacity of CART cells relative to cells treated with no guide. Finally, edited CART cells were investigated for their ability to resist immunosuppression by the rapalog RAD001. The results are shown in FIG. 58. These data indicate that editing of FKBP1A (and subsequence loss of FKBP12 protein) renders CART cells refractory to the inhibitory effects of the rapalog RAD001.

### Example 14: Expression of HLA-G:B2M Fusion Protein

[1538] Without being bound by theory, it is believed that a cell that has been rendered TCR−/B2M−/CIITA−may be recognized as foreign by NK cells and targeted for destruction. Thus, an otherwise unmodified TCR−/B2M−/CIITA−allogeneic CART cell may be at risk for attack when administered to, for example, a cancer patient. Again, without being bound by theory, it is believed that expression of HLA-G on said cells should suppress any NK cell activity against that cell. Because some forms of HLA-G require B2M, for cells in which expression of B2M has been reduced or eliminated, we investigated expression of a HLA-G:B2M fusion molecule.

[1539] The HLA-G/B2M fusion protein was synthesized as follows. 32 microglobulin and HLA-G amino acid sequences were obtained from databases. It is known that the HLA-G1 isoform of HLA-G forms a complex with B2M at the cell surface. In order to reconstitute this complex, for example, in a B2M−cell, the β2 microglobulin N terminal fusion polypeptide was linked to HLA-G1. Furthermore, B2M is linked to HLA-G1 through a glycine/serine (G4S)n linker (SEQ ID NO: 6629). The amino acid sequence was designed in the following order to create the fusion protein: B2M sequence—(G4S)3-HLA-G1 (“(G4S)3” disclosed as SEQ ID NO: 6594). The fusion protein nucleotide sequence was codon optimized by GeneArt® GeneOptimizer® process (Thermo Fisher Scientific Inc) for mammalian cell expression. Optimized DNA was synthesized by Genescript. Synthesized DNA was amplified by PCR (NEB, Q5@ Hot Start High-Fidelity DNA Polymerase, Catalog number: M0493L) and subcloned to pELPS vector by Gibson Assembly (NEB, Catalog number: E2611L). Subclone sequence was further verified by genewiz sequencing.

[1540] HLA-G-B2M Virus or HLA-G virus was generated using LentiX-293T cells. The cells were transfected with HLA-G-B2M or HLA-G lentiviral DNA plasmid along with packaging plasmid DNA (pRSV.REV (Rev expression plasmid), pMDLg/p.RRE (Gag/Pol expression plasmid), pVSV-G (VSV glycoprotein expression plasmid)) using Lipofectamine 2000 (Invitrogen). Media was changed after 12 hours post transfection. Fresh media was added to the cells and supernatants were harvested 30 hours post media change. Using LentiX concentrator, the virus was concentrated and aliquoted to be frozen. Virus was tittered using supT1 cells. Serial dilution of supernatant containing virus was incubated with 20,000 SupT1 cells for 3 days. Fresh media was added 24 hr after transduction. Cells were harvested and washed with FACS buffer and incubated with anti HLA-G-PE antibody. (335906 Biolegend) and cells were analyzed using BD Fortessa and flowJo Software.

[1541] FIG. 59 shows the results of transduction of SupT1 cells with nucleic acid encoding the HLA-G:B2M fusion described above. The HLA-G/B2M fusion protein was introduced into SupT1 cells by lentiviral transduction. Cells surface expression of HLA-G was detected by flow cytometry. The light gray histogram indicates the background fluorescence in the PE channel in untransduced cells. The dark gray histogram indicates fluorescence in the PE channel from cells transduced with HLA-G/B2M. This indicates successful expression and surface location of HLA-G:B2M fusion protein in T cells.

### Example 15: Editing of CD3-Epsilon (CD3 E) in HEK-293(Cas9) Cells

[1542] dgRNA molecules comprising the indicated targeting domain were chemically synthesized, and editing assessed in HEK-293 cells by NGS as described in Example 1. The results of the editing experiments are shown in Table 28. This Example shows gRNA molecules targeting CD3 E are capable of editing the target locus when delivered as RNP at frequencies ranging from 3% to over 75%. Several gRNA molecules were able to edit more than 50% of the cells, including producing a frameshift mutation in more than 50% of the cells.

TABLE 28
% Edit and % Frameshift Edit with dgRNA
to CD3E in HEK-293(Cas9) Cells

| | Avg. % | | Avg. | |
|---|---|---|---|---|
| Targeting | Edit (any | Std. Dev. % | Frameshift | Std. Dev. |
| Domain ID | indel) | Edit | % | Frameshift |
| CR002275 | 76.01 | 5.72 | 15.70 | 0.95 |
| CR002282 | 67.86 | 4.87 | 49.37 | 3.04 |
| CR002272 | 64.58 | 4.15 | 46.13 | 2.53 |
| CR002317 | 64.37 | 8.01 | 52.67 | 7.38 |
| CR002242 | 62.63 | 14.18 | 60.27 | 13.41 |
| CR002254 | 60.61 | 11.17 | 57.40 | 10.85 |
| CR002253 | 60.56 | 12.93 | 57.47 | 12.22 |
| CR002238 | 59.48 | 9.56 | 47.73 | 8.60 |
| CR002316 | 58.02 | 6.94 | 33.73 | 1.04 |
| CR002244 | 57.67 | 8.32 | 55.70 | 7.45 |
| CR002273 | 56.67 | 14.54 | 41.70 | 12.21 |
| CR002269 | 55.71 | 9.82 | 39.57 | 6.98 |
| CR002234 | 53.46 | 5.59 | 48.40 | 4.19 |
| CR002306 | 52.44 | 2.86 | 39.37 | 2.12 |
| CR002294 | 50.53 | 2.60 | 43.10 | 2.51 |
| CR002239 | 49.40 | 10.43 | 41.43 | 9.15 |
| CR002263 | 49.02 | 10.60 | 46.10 | 9.98 |
| CR002257 | 48.84 | 4.53 | 27.40 | 1.85 |
| CR002312 | 48.83 | 5.89 | 41.00 | 6.08 |
| CR002292 | 48.53 | 2.67 | 26.27 | 0.91 |
| CR002262 | 46.30 | 9.31 | 40.53 | 7.39 |
| CR002248 | 44.72 | 11.44 | 29.47 | 7.17 |
| CR002243 | 43.63 | 5.20 | 42.90 | 5.22 |
| CR002276 | 43.24 | 8.71 | 24.47 | 5.10 |
| CR002286 | 42.49 | 12.84 | 34.50 | 8.76 |
| CR002313 | 42.09 | 16.14 | 32.37 | 11.91 |
| CR002280 | 41.57 | 6.24 | 35.23 | 4.77 |
| CR002305 | 41.32 | 4.80 | 29.00 | 2.55 |
| CR002293 | 40.95 | 13.91 | 33.93 | 10.96 |
| CR002250 | 40.13 | 8.00 | 29.93 | 5.62 |
| CR002274 | 39.19 | 4.25 | 21.20 | 4.16 |
| CR002270 | 39.10 | 9.71 | 20.90 | 4.78 |
| CR002287 | 38.67 | 4.82 | 31.63 | 3.42 |
| CR002237 | 38.48 | 8.58 | 33.90 | 7.32 |
| CR002233 | 37.97 | 16.11 | 30.65 | 13.22 |
| CR002240 | 37.60 | 8.12 | 27.67 | 5.78 |
| CR002268 | 37.55 | 6.09 | 33.63 | 5.30 |
| CR002309 | 36.78 | 11.88 | 25.40 | 6.76 |
| CR002235 | 35.81 | 13.86 | 31.33 | 11.72 |
| CR002304 | 35.42 | 4.37 | 31.63 | 3.45 |
| CR002258 | 34.45 | 3.18 | 28.67 | 2.30 |
| CR002266 | 34.31 | 8.23 | 28.87 | 7.65 |
| CR002308 | 33.64 | 6.64 | 25.73 | 6.48 |
| CR002281 | 33.35 | 4.23 | 26.00 | 4.04 |
| CR002310 | 31.16 | 12.69 | 20.73 | 8.20 |
| CR002256 | 31.04 | 5.30 | 27.83 | 4.20 |
| CR002271 | 30.93 | 10.56 | 21.93 | 7.31 |
| CR002288 | 30.39 | 6.64 | 20.43 | 4.56 |
| CR002236 | 29.27 | 12.38 | 25.90 | 10.78 |
| CR002289 | 29.10 | 7.53 | 20.63 | 4.28 |
| CR002307 | 29.04 | 5.90 | 22.00 | 4.74 |
| CR002284 | 29.02 | 7.03 | 24.33 | 6.11 |
| CR002279 | 28.69 | 2.73 | 27.30 | 2.63 |
| CR002291 | 28.24 | 5.73 | 24.50 | 4.72 |
| CR002241 | 27.78 | 8.43 | 24.37 | 7.27 |
| CR002277 | 27.37 | 6.06 | 20.43 | 3.67 |
| CR002260 | 26.89 | 7.90 | 21.93 | 5.79 |
| CR002245 | 26.47 | 5.52 | 22.97 | 4.95 |
| CR002303 | 26.17 | 6.27 | 22.43 | 5.61 |
| CR002267 | 26.14 | 6.26 | 23.83 | 5.66 |
| CR002249 | 25.67 | 12.15 | 15.37 | 7.09 |
| CR002299 | 25.37 | 3.62 | 15.03 | 3.63 |
| CR002283 | 24.47 | 6.84 | 19.07 | 5.75 |
| CR002297 | 24.19 | 3.09 | 13.80 | 1.90 |
| CR002252 | 22.37 | 4.23 | 12.57 | 1.43 |
| CR002290 | 21.69 | 7.77 | 16.60 | 5.82 |
| CR002285 | 21.07 | 10.10 | 15.70 | 7.20 |
| CR002298 | 20.74 | 6.51 | 19.13 | 6.60 |
| CR002230 | 20.64 | 10.21 | 20.10 | 10.02 |
| CR002232 | 20.62 | 5.79 | 20.30 | 5.63 |
| CR002311 | 20.48 | 3.46 | 12.73 | 1.10 |
| CR002300 | 19.46 | 11.73 | 15.07 | 9.41 |
| CR002259 | 19.23 | 6.38 | 15.27 | 5.03 |
| CR002296 | 18.26 | 2.92 | 17.33 | 2.61 |
| CR002261 | 17.11 | 3.65 | 15.50 | 3.08 |
| CR002251 | 16.52 | 2.59 | 13.03 | 2.44 |
| CR002302 | 14.54 | 3.42 | 12.93 | 3.02 |
| CR002231 | 13.83 | 4.08 | 12.37 | 3.70 |
| CR002295 | 13.11 | 9.91 | 5.20 | 3.90 |
| CR002246 | 12.89 | 5.72 | 12.07 | 5.35 |
| CR002265 | 12.38 | 4.56 | 10.20 | 3.46 |
| CR002278 | 11.66 | 4.48 | 7.47 | 3.23 |
| CR002301 | 10.91 | 1.00 | 4.70 | 0.26 |
| CR002255 | 7.38 | 2.00 | 6.43 | 1.85 |
| CR002315 | 5.97 | 0.49 | 5.63 | 0.47 |
| CR002264 | 5.96 | 1.05 | 5.57 | 0.83 |
| CR002247 | 3.92 | 1.09 | 3.43 | 0.96 |
| CR002314 | 3.43 | 0.99 | 3.40 | 0.95 |

### Example 16: Evaluation of Cas9 Variants

### Evaluation in CD34+ Hematopoietic Stem Cells

[1543] We evaluated 14 purified Streptococcus pyogenes Cas9 (SPyCas9) proteins by measuring their efficiency of knocking out the beta-2-microglobulin (B32M) gene in primary human hematopoietic stem cells (HSCs). These proteins were divided into 3 groups: the first group consisted of SPyCas9 variants with improved selectivity (Slaymaker et al. 2015, Science 351: 84 (e1.0, e1.1 and K855A); Kleinstiver et al. 2016, Nature 529: 490 (HF11)). The second group consisted of wild type SPyCas9 with different numbers and/or positions of the SV40 nuclear localization signal (NLS) and the 6×Histidine (His6) (SEQ ID NO: 10795) or 8×Histidine (His8) (SEQ ID NO: 10796) tag with or without a cleavable TEV site, and a SPyCas9 protein with two cysteine substitutions (C80L, C574 E), which have been reported to stabilize Cas9 for structural studies (Nishimasu et al. 2014, Cell 156:935). The third group consisted of the same recombinant SPyCas9 produced by different processes (FIG. 60). B2M knockout was determined by FACS and next generation sequencing (NGS).

### Methods

### Materials

[1544] 1. Neon electroporation instrument (Invitrogen, MPK5000)
[1545] 2. Neon electroporation kit (Invitrogen, MPK1025)
[1546] 3. crRNA (targeting domain of CR00441 (SEQ ID NO: 5495) fused to SEQ ID NO: 6607)
[1547] 4. tracrRNA (SEQ ID NO: 6660)
[1548] 5. Cas9 storage buffer: 20 mM Tris-C1, pH 8.0, 200 mM KCl, 10 mM MgCl₂
[1549] 6. Bone marrow derived CD34+ HSCs (Lonza, 2M-101C)
[1550] 7. Cell culture media (Stemcell Technologies, StemSpam SFEM II with StemSpam CC-100)
[1551] 8. FACS wash buffer: 2% FCS in PBS
[1552] 9. FACS block buffer: per mL PBS, add 0.5 ug mouse IgG, 150 ug Fc block, 20 uL FCS
[1553] 10. Chelex suspension: 10% Chelex 100 (bioRad, Cat #142-1253) in H₂O
[1554] 11. Anti-B2M antibody: Biolegend, cat #316304

### Process

[1555] Thaw and grow the cells following Lonza's recommendations, add media every 2-3 days. On day 5, pellet the cells at 200×g for 15 min, wash once with PBS, resuspend the cells with T-buffer from NEON kit at 2×10⁴/uL, put on ice. Dilute Cas 9 protein with Cas9 storage buffer to 5 mg/ml. Reconstitute crRNA and tracrRNA to 100 uM with H₂O. The ribonucleoprotein (RNP) complex is made by mixing 0.8 uL each of CAS 9 protein, crRNA and tracrRNA with 0.6 uL of Cas9 storage buffer, incubate at room temperature for 10 min. Mix 7 μL of HSCs with RNP complex for two minutes and transfer the entire 10 uL into a Neon pipette tip, electroporate at 1700v, 20 ms and 1 pulse. After electroporation, immediately transfer cells into a well of 24-well plate containing 1 ml media pre-calibrated at 37° C., 5% CO₂. Harvest cells 72 hrs post-electroporation for FACS and NGS analysis.

[1556] FACS: take 250 μL of the cells from each well of 24-well plate, to wells of 96-well U-bottom plate and pellet the cells. Wash once with 2% FCS (fetal calf serum)-PBS. Add 50 uL FACS block buffer to the cells and incubate on ice for 10 minutes, add 1 uL FITC labeled B2M antibody and incubate for 30 minutes. Wash with 150 uL FACS wash buffer once followed by once more with 200 uL FACS wash buffer once. Cells were resuspended in 200 uL FACS buffer FACS analysis.

[1557] NGS sample prep: transfer 250 μL of cell suspension from each well of the 24-well plate to a 1.5 ml Eppendorf tube, add 1 mL PBS and pellet the cells. Add 100 μL of Chelex suspension, incubate at 99° C. for 8 minutes and vortex 10 seconds followed by incubating at 99° C. for 8 minutes, vortex 10 seconds. Pellet down the resin by centrifuging at 10,000×g for 3 minutes and the supernatant lysate is used for PCR. Take 4 uL lysate and do PCR reaction with the b2m primers (b2mg67F: CAGACAGCAAACTCACCCAGT (SEQ ID NO: 10807), b2mg67R: CTGACGCTTATCGACGCCCT (SEQ ID NO: 10808)) using Titanium kit (Clonetech, cat #639208) and follow the manufacturer's instruction. The following PCR conditions are used: 5 minutes at 98° C. for 1 cycle; 15 seconds at 95° C., 15 seconds at 62° C., and 1 minute at 72° C. for 30 cycles; and finally 3 minutes at 72° C. for 1 cycle. The PCR product was used for NGS.

[1558] Statistics: The percentage of B2M KO cells by FACS and the percentage of indels by NGS are used to evaluate the CAS 9 cleavage efficiency. The experiment was designed with Cas9 as fixed effect. Each experiment is nested within donors, as nested random effects. Therefore, the mixed linear model was applied for the analysis of FACS and NGS data.

### Results

[1559] In order to normalize the experimental and donor variations, we graphed the relative activity of each protein to iProt105026, the original design with two SV40 NLS flanking the wild type SPyCas9 and the His6 tag (SEQ ID NO: 10795) at the C-terminal of the protein (FIG. 60). The statistical analysis shows that compared with the reference Cas9 protein iProt105026, iProt106331, iProt106518, iProt106520 and iProt106521 are not significantly different in knocking out B2M in HSCs, while the other variants tested (PID426303, iProt106519, iProt106522, iProt106545, iProt106658, iProt106745, iProt106746, iProt106747, iProt106884) are highly significantly different from the reference iProt105026 in knocking out B2M in HSCs. We found that moving the His6 tag (SEQ ID NO: 10795) from the C-terminal to N-terminal (iProt106520) did not affect the activity of the protein (FIG. 60). One NLS was sufficient to maintain activity only when it was placed at the C-terminal of the protein (iProt106521 vs. iProt106522, FIG. 60). Proteins purified from process 1 had consistent higher knockout efficiency than those from processes 2 and 3 (iProt106331 vs. iProt106545 & PID426303, FIG. 60). In general, the SPyCas9 variants with a reported improved selectivity were not as active as the wild type SPyCas9 (iProt106745, iProt106746 and iProt106747, FIG. 60). Interestingly iProt106884 did not cut the targeting site. This is consistent with the report by Kleinstiver et al that this variant failed to cut up to 20% of the legitimate targeting sites in mammalian cells (Kleinstiver et al. 2016, Nature 529: 490). Finally, the Cas9 variant with two cysteine substitutions (iProt106518) maintained high levels of enzymatic activity (FIG. 60).

### Evaluation in T Cells

### Methods

[1560] The different S Pyogenes Cas9 variants shown in Table 29 were used in these experiments. The structures are also shown in FIG. 60.

TABLE 29
Cas9 variants (NLS = SV40 NLS; Cas9 = S. Pyogenes
Cas9 wild type, with any mutations indicated in parenthesis;
Cas9e1.1 (as described in Slaymaker et al. 2015, Science
351: 84); GGS = glycine-glycine-serine).

| | CAS9 | | | |
|---|---|---|---|---|
| | (His6 disclosed | | | |
| | as SEQ ID | Size | Conc | Molar conc. |
| iprot | NO: 10795) | (Daltons) | (ug/ml) | [uM] |
| 106520 | His6-GGS-NLS- | 161696.22 | 6.2 | 38.34 |
| | CAS9-NLS | | | |
| 106518 | NLS-CAS9(C80L, C574E)- | 161531.04 | 6.5 | 40.24 |
| | NLS-His6 | | | |
| 106521 | NLS-CAS9-His6 | 160629.9 | 6 | 37.12 |
| 106745 | NLS-CAS9(K855A)- | 161437.94 | 5.9 | 36.55 |
| | NLS-His6 | | | |
| 106747 | NLS-CAS9e1.1-NLS-His6 | 161295.74 | 6.5 | 40.3 |
| 106154 | NLS-CAS9-NLS-His6 | 161495.04 | 5.9 | 36.54 |
| (also | | | | |
| referred | | | | |
| to as | | | | |
| 105026) | | | | |

[1561] PBMC were isolated from human blood (obtained from Hemacare/ALL Cells) by using centrifugation method using Ficoll (GE Healthcare catalog #17-1440-03). Total T cells were isolated from these PBMC's using human Pan T Cell Isolation Kit (Miltenyi Biotec #130-096-535). These cells were aliquoted, frozen using CRYOSTOR CS10 media (Biolife Solution-210102), and stored in liquid nitrogen. These frozen cell aliquots were then thawed in a 37° C. water bath for 20 sees and then transferred to a 50 ml conical tube in 10 ml of pre-warmed T cell media and centrifuged at 300 rpm for 5-10 mins at 24 degrees C. to remove the freezing media and resuspended with prewarmed T cell media. These are then activated by using CD3/CD28 beads (DynaBeads Invitrogen Cat #111.41D) at a bead to cell ratio of 3:1 at keeping the cell concentration at 0.5 million/ml and activated using CD3/CD28 beads (DynaBeads Invitrogen Cat #111.41D) at bead to cell ratio of 3:1 at 0.5 million/ml concentration of cells.

[1562] On Day 3 post bead activation, the 200,000 cells are used per electroporation. RNP complex used for T cell genome editing was formed using a 1:2 molar ratio of Cas9 protein to RNA (crRNA and tracRNA). 100 μM crRNA ([targeting domain]-[SEQ ID NO: 6607]) and 100 μM tracrRNA (SEQ ID NO: 6660) were denatured separately at 95° C. for 2 min and cooled to room temperature. In a final volume of 5 μL, 1.4 μL of Cas9 proteins at a concentration of 5.9 μg/μL was mixed with 1.6 μL of reaction buffer (20 mM Tris, pH8.0; 200 mM KCL, 10 mM MgCl2) and mixed with 1 μL of 100 μM tracrRNA at room temperature. Next 1 μL of 100 μM crRNA was added, mixed and incubated for 10 min at 37° C. The targeting domain for B2M was CR000442, and for TRAC was CR000961. These RNP's at higher concentrations were used to generate samples of RNP serial dilutions. These RNP dilutions were then used to mix with 200,000 cells in 10 ul of T Buffer (neon transfection system 10 ul Kit). Electroporation was performed by Neon electroporator using Neon® Transfection System 10 μL Kit (MPK1096) at 1600V, 10 ms, 3 pulses. Cells were cultured in T cell media without antibiotics. Cells were taken from each sample pipetted to dissociate them from beads and beads were removed by using 96 welled plate magnet and centrifuged with 100 ul of FACS buffer (Miltenyi MACS buffer catalog #130-092-987 with 0.5% BSA (Miltenyi-catalog #130-091-376) to wash the cells. Cells were then incubated with different antibodies diluted in 100 ul FACS buffer for 30 mins on ice. Cells were then washed two times with 200 ul of FACS buffer. Cells are then resuspended in 150 ul of FACS buffer and run on BD 5 laser Fortessa. Expression of TCR was detected by using anti-CD3-PercpCy5.5 (Ebiosciences 45-0037-42) and expression of B2M was detected by using anti-B2M-APC (316312 Biolegend). Flow cytometry data was analyzed using FlowJo Software.

### Results

[1563] Generation of low concentrations of RNP, and highest editing efficiency, proceeded well when RNP was generated at high concentration, and then diluted to the desired concentrations. 6 different Cas9 proteins were tested for efficiency of editing using the B2M guide CR00442 in primary T cells. Editing efficiency was measured using cell surface detection by flow cytometry of the B2M protein and the results are shown in FIG. 61 (Y-axis; % Editing of B2M) 3 days after RNP electroporation at the indicated concentrations of RNP (X-axis). The different Cas9 proteins tested are indicated by their “iprot” ID numbers (see FIG. 60 and Table. The results are shown in FIG. 61. These data indicate that all of these variants of Cas9 are active, but Cas9 proteins 106521, 106518, and 106154 (also referred to as 105026) show higher activity in T cells, as evidenced by their greater activity at lower concentrations of RNP. Next, two different Cas9 proteins, 106884 or 106154 (also referred to as 105026), as indicated, were tested for editing efficiency using the B2M targeting guide CR00442 (FIG. 62, left panel) or the TRAC targeting guide CR000961 (FIG. 62, right panel) by using different concentrations of RNP as indicated on the X-axis. Editing efficiency (% editing) was measured by flow cytometry by measuring the loss of cell surface expression of B2M (FIG. 62, left panel) or TCR using CD3 epsilon antibody (FIG. 62, right panel).

### Example 17: Off-Target Evaluation

### T Cell Culture and CRISPR/Cas9 Genome Editing

[1564] Peripheral blood mononuclear cells (PBMC) were isolated from human blood (HemaCare, Cat #PB000) using standard Ficoll density gradient centrifugation methods. Total T cells were isolated from PBMC using the Pan T Cell Isolation Kit for human cells (Miltenyi Biotec, Cat #130-096-535) following manufacturer's recommendations and stored at −80° C. T cells were thawed and activated using Dynabeads Human T-Activator CD3/CD28 for T Cell Expansion and Activation (Thermo Fisher Scientific, Cat #11131D) at a 3:1 bead to cell number ratio following manufacturer's recommendations. T cells were cultured in antibiotic-free complete T cell medium (RPMI 1640 with L-glutamine, Lonza, Cat #12-702F; 10% FBS, GE HyClone, Cat #SH30071; 200 mM L-glutamine, GE HyClone, Cat #SH30034.01; 10 mM non-essential amino acids, GE HyClone, Cat #13-114 E; 100 mM sodium pyruvate, Invitrogen, Cat #11360-070; 1 M HEPES buffer, GE HyClone, Cat #17-737 E and 55 mM 2-mercaptoethanol, Invitrogen, Cat #21985-023) at 37° C., 5% CO₂ for 3 days prior to genome editing.

[1565] RNP complex used for T cell genome editing was formed using a 1:2 molar ratio of Cas9 protein to gRNA (crRNA and tracRNA). Chemically synthesized crRNA at a concentration of 100 μM ([targeting domain]-[SEQ ID NO: 6607]) and tracr (SEQ ID NO: 6660) at a concentration of 100 μM were denatured separately at 95° C. for 2 min and cooled to room temperature. In a final volume of 5 μbuffer (20 mM Tris, pH8.0; 200 mM KCL, 10 mM MgCl₂), Cas9 protein (NLS-Cas9-NLS-His6 (“His6” disclosed as SEQ ID NO: 10795); iPROT105026; NLS=SV40 NLS; Cas9=wt S. Py Cas9) was first mixed with tracrRNA at room temperature and then mixed with crRNA and incubated for 5 min at 37° C. Final concentrations of Cas9 protein, tracrRNA and crRNA used were 10 μM, 20 μM and 20 μM respectively. Bead activated T cells were collected by centrifugation and resuspended in the Neon electroporation kit T buffer (Invitrogen; Cat #MPK1096) at a cell density of 20×10⁶/mL. 5 μL of RNP was mixed with 10 μL of T cells by gentle pipetting and incubated at room temperature for 5 min. The RNP T cell mixture was transferred into a 10 μL Neon electroporation tip probe. Electroporation was performed using the Neon transfection system (Invitrogen; MPK5000S) using the following conditions: 3 pulses of 1600 volts/10 milliseconds. Duplicate 10 μL electroporation reactions were performed. Electroporated T cells were then immediately transferred into 200 μL pre-warmed antibiotics-free complete T cell medium in a 96 well plate and incubated at 37° C., 5% CO₂ for 2 days. T cells were then diluted at 1:1 volume using antibiotics-free complete T cell medium and transferred to a 24 well plate and cultured an additional 4-7 days at 37° C., 5% CO₂. In parallel activated T cells without RNP treatment were similarly cultured to serve as untreated control samples. T cells were then collected by centrifugation and genomic DNA was isolated from 1-2 million cells using the DNeasy Blood & Tissue Kit (Qiagen, Cat #69506) following the manufacturer's recommendations. Genome editing was performed for gRNAs comprising the targeting domain sequences of CR00442, CR00444, CR000961 and CR000984 generating two treated and one untreated replicate per gRNA.

In Silico Identification of Potential gRNA Off-Target Loci

[1566] For gRNAs CR00442, CR00444, CR000961 and CR000984, potential off-target loci were identified by aligning the 20 nucleotide gRNA protospacer sequence to the human genome reference sequence (build GRCh38) using the BFAST sequence aligner (version 0.6.4f, Homer et al, PLoS One, 2009, 4(11), e7767, PMID: 19907642) using standard parameters allowing up to 5 nucleotide mismatches. Loci identified were filtered to only contain sites that are 5′ adjacent to the Cas9 canonical 5′-NGG-3′ PAM sequence (i.e. 5′-off-target locus-PAM-3′). Using the BEDTools script (version 2.11.2, Quinlan and Hall, Bioinformatics, 2010 26(6):841-2, PMID: 20110278) sites with 5 nucleotide mismatches were further filtered against RefSeq gene annotations (Pruitt et al, Nucleic Acids Res., 2014 42 (Database issue):D756-63, PMID: 24259432) to only contain loci annotated as exons. Counts of the potential off-target loci identified for each gRNA are shown in Table 30.

TABLE 30
Counts of in silico off-target loci identified for
gRNAs CR00442, CR00444, CR000961 and CR00098 with
0, 1, 2, 3 and 4 nucleotide mismatches and 5 nucleotide
mismatches within RefSeq exons are shown.

| | | Number of off-targets with N mismatches | | | | | | |
|---|---|---|---|---|---|---|---|---|
| | | | | | | | 5 RefSeq | |
| Gene | gRNA name | 0 | 1 | 2 | 3 | 4 | exons | Total |
| B2M | CR00442 | 0 | 0 | 0 | 7 | 72 | 71 | 150 |
| | CR00444 | 0 | 0 | 0 | 2 | 24 | 33 | 59 |
| TRAC | CR000961 | 0 | 0 | 2 | 23 | 224 | 63 | 312 |
| | CR000984 | 0 | 0 | 0 | 3 | 40 | 15 | 58 |

[1567] PCR primer design for targeted amplification of potential off-target sites PCR amplicons targeting potential off-target loci (and the on-target locus) identified for gRNAs CR00442, CR00444, CR000961 and CR00098 were design using Primer3 (version 2.3.6, Untergasser et al, Nucleic Acids Res., 2012 40(15):e115, PMID: 22730293) using default parameters aiming for an amplicon size range of approximately 160-300 bp in length with the gRNA protospacer sequence located in the center of the amplicon. Resulting PCR primer pairs and amplicon sequences were checked for uniqueness by BLAST searching (version 2.2.19, Altschul et al, J Mol Biol., 1990, 215(3):403-10, PMID: 2231712) sequences against the human genome reference sequence (build GRCh38). Primer pairs resulting in more than one amplicon sequence were discarded and redesigned. Table 31 provides a count of successful primer pairs designed for each gRNA.

### Illumina Sequencing Library Preparation, Quantification and Sequencing

[1568] Genomic DNA from RNP treated (2 replicates per gRNA) and untreated (1 replicate per gRNA) T-cell samples was quantified using the Quant-iT PicoGreen dsDNA kit (Thermo Fisher, Cat #P7581) using manufacture's recommendations. Illumina sequencing libraries targeting individual off-target loci (and the on-target locus) were generated for each sample using two sequential PCR reactions. The first PCR amplified the target locus using target specific PCR primers (designed above) that were tailed with universal Illumina sequencing compatible sequences. The second PCR added additional Illumina sequencing compatible sequences to the first PCR amplicon, including sample barcodes to enable multiplexing during sequencing. PCR 1 was performed in a final volume of 10 μL with each reaction containing 6 ng of gDNA (equivalent to approximately 1000 cells), PCR 1 primer pairs (Integrated DNA Technologies) at a final concentration of 0.25 μM and 1× final concentration of Q5 Hot Start Master Mix (New England BioLabs, Cat #102500-140). PCR 1 left primers were 5′ tailed (i.e. 5′-tail-target specific left primer-3′) with sequence 5′-TCGTCGGCAGCGTCAGATGTGTATAAGAGACAG-3′ (SEQ ID NO: 10810) and right primers were 5′ tailed (i.e. 5′-tail-target specific right primer-3′) with sequence 5′-GTCTCGTGGGCTCGGAGATGTGTATAAGAGACAG-3′ (SEQ ID NO: 10811). PCR 1 was performed on a thermocycler using the following cycling conditions: 1 cycle of 98° C. for 1 min; 25 cycles of 98° C. for 10 sec, 63° C. for 20 sec, and 72° C. for 30 sec; 1 cycle at 72° C. for 2 min. PCR 1 was then diluted 1 in 100 using nuclease free water (Ambion, Cat #AM9932) and used as input into PCR 2. PCR 2 was performed in a final volume of 10 μL with each reaction containing 2 μL of diluted PCR 1 product, PCR 2 primer pairs (Integrated DNA Technologies) at a final concentration of 0.5 μM and 1× final concentration of Q5 Hot Start Master Mix (New England BioLabs, Cat #102500-140). PCR 2 left primer sequence used was 5′-AATGATACGGCGACCACCGAGATCTACACNNNNNNNNTCGTCGGCAGCGTC-3′ (SEQ ID NO: 10812) and PCR 2 right primer sequence used was 5′-CAAGCAGAAGACGGCATACGAGATNNNNNNNNGTCTCGTGGGCTCGG-3′ (SEQ ID NO: 10813) where the NNNNNNNN denote an 8 nucleotide barcode sequence used for sample multiplexing as part of the standard Illumina sequencing process. PCR 2 was performed on a thermocycler using the following cycling conditions: 1 cycle of 72° C. for 3 min; 1 cycle of 98° C. for 2 min; 15 cycles of 98° C. for 10 sec, 63° C. for 30 sec, and 72° C. for 2 min. PCR 2 amplicons, now viable Illumina sequencing libraries, were cleaned up using Agencourt AMPure XP beads (Beckman Coulter, Cat #A63882) following the manufacture's recommendations. The cleaned Illumina sequencing libraries were then quantified using standard qPCR quantification methods using Power SYBR Green PCR master mix (Life Technologies, Cat #4367660) and primers specific to the Illumina sequencing library ends (forward primer sequence 5′-CAAGCAGAAGACGGCATACGA-3′ (SEQ ID NO: 10814) and reverse primer sequence 5′-AATGATACGGCGACCACCGAGA-3′ (SEQ ID NO: 10815)). Illumina sequencing libraries were then pooled equimolar and subjected to Illumina sequencing on a MiSeq instrument (Illumina, Cat #SY-410-1003) with 300 base paired-end reads using a MiSeq Reagent Kit v3 (Illumina, Cat #MS-102-3003) following the manufacture's recommendations. A minimum of 1000-fold sequence coverage was generated for each locus. PCR, cleanup, pooling and sequencing of treated and untreated samples were performed separately to avoid any possibility of cross contamination between treated and untreated samples or PCR amplicons generated therefrom.

### Illumina Sequencing Data QC and Variant Analysis

[1569] Using default parameters, the Illumina MiSeq analysis software (MiSeq reporter, version 2.6.2, Illumina) was used to generate amplicon specific FASTQ sequencing data files (Cock et al, Nucleic Acids Res. 2010, 38(6):1767-71, PMID: 20015970). FASTQ files were then processed through an internally developed variant analysis pipeline consisting of a series of public domain software packages joined together using a standard Perl script wrapper. The workflow used was divided into five stages.

[1570] Stage 1, PCR primer and on- and off-target sequence QC: For both on- and off-target sites the 20 nucleotide gRNA protospacer sequence plus PAM sequence and target specific PCR primer sequences (left and right without the additional Illumina sequenced) were aligned to the human genome reference sequence (build GRCh38) using a BLAST search (version 2.2.29+, Altschul et al, J Mol Biol., 1990, 215(3):403-10, PMID: 2231712). On- and off-target sites with multiple genomic locations were flagged.

[1571] Stage 2, sequencer file decompression: Illumina sequencer generated FASTQ.GZ files were decompressed to FASTQ files using the gzip script (version 1.3.12) and number of reads per file was calculated. Files with no reads were excluded from further analysis.

[1572] Stage 3, sequence read alignment and quality trimming: Sequencing reads in FASTQ files were aligned to the human genome reference sequence (build GRCh38) using the BWA-MEM aligner (version 0.7.4-r385, Li and Durbin, Bioinformatics, 2009, 25(14):1754-60, PMID: 19451168) using ‘hard-clipping’ to trim 3′ ends of reads of Illumina sequences and low quality bases. Resulting aligned reads, in the BAM file format (Li et al, Bioinformatics, 2009 25(16):2078-9, PMID: 19505943), were converted to FASTQ files using the SAMtools script (version 0.1.19-44428cd, Li et al, Bioinformatics, 2009 25(16):2078-9, PMID: 19505943). FASTQ files were then aligned again to the human genome reference sequence (build GRCh38) using the BWA-MEM aligner, this time without ‘hard-clipping’.

[1573] Stage 4, variant (SNP and INDEL) analysis: BAM files of aligned reads were processed using the VarDict variant caller (version 1.0 ‘Cas9 aware’ modified by developer ZhangWu Lia, Lai et al, Nucleic Acids Res., 2016, 44(11):e108, PMID: 27060149) with allele frequency detection limit set at >=0.0001 to identify variants (SNPs and INDELs). The Cas9 aware VarDict caller is based on a public domain package but able to move ambiguous variant calls, generated due to repetitive sequences in the alignment region of the variant events, toward the potential Cas9 nuclease cut site in the gRNA protospacer sequence located 3 bases 5′ of the PAM sequence. The SAMtools script was used to calculate read coverage per sample amplicon to determine whether the on- and off-target sites were covered at >1000-fold sequence coverage. Sites with <1000-fold sequence coverage were flagged and more sequencing data was generated.

[1574] Stage 5, dbSNP filtering and treated/untreated differential analysis: Variants identified were filtered for known variants (SNPs and INDELs) found in dbSNP (build 142, Shery et al, Nucleic Acids Res. 2001, 29(1):308-11, PMID: 11125122). Variants in the treated samples were further filtered to exclude: 1) variants identified in the untreated control samples; 2) variants with a VarDict strand bias of 2:1 (where forward and reverse read counts supporting the reference sequence are balanced but imbalanced for the non-reference variant call); 3) variants located outside a 100 bp window around the potential Cas9 cut site; 4) single nucleotide variants within a 100 bp window around the potential Cas9 cut site. Finally only sites with a combined INDEL frequency of >2% (editing in more than approximately 20 cells) in a 100 bp window of the potential Cas9 cut site were considered. Potential active editing sites were further examined at the read alignment level using the Integrative Genome Viewer (IGV version 2.3, Robinson et al, Nat Biotechnol. 2011, 9(1):24-6, PMID: 21221095) that allows for visual inspection of read alignments to the genome reference sequence. Sites identified to have potential off-target activity were reworked a second time through the entire laboratory (starting with PCR) and analysis process.

### On- and Off-Target Analysis Results

[1575] On-target sites for gRNA CR00442, CR00444, CR000961 and CR000984 all showed robust editing at the intended Cas9 cut site in both treated biological replicates with an average variant frequency of 96%, 84%, 81%, and 98% respectively. No editing was observed in any of the untreated control samples. Table 31 shows number of off-target sites identified and characterized. Uncharacterized sites either failed in PCR primer design or PCR amplification and are currently still under investigation.

[1576] gRNA CR00442: The on-target site for gRNA CR00442 showed robust editing at the intended Cas9 cut site in both treated biological replicates with an average INDEL frequency of 96%. No editing was observed in the untreated control sample. Table 31 shows the number of off-target sites characterized. Uncharacterized sites failed in PCR primer design or PCR amplification and are currently still under investigation. Characterization of potential off-target sites identified two weak off-target sites for gRNA CR00442 with average INDEL frequencies of 3.7% and 4.4% in the 100 bp window around the proposed Cas9 cut site. One site has 3 mismatches relative to the on-target gRNA protospacer sequence (5′-GGCaACaGAGCGAGACAaCT-PAM-3′, PAM=GGG (SEQ ID NO: 10816)) and is located in intron 1 of the zinc finger protein 440 gene (ZNF440) on chromosome 19 at base pair position 11,815,253-11,815,275, approximately 0.9 kb away from exon 1. The second site also has 3 mismatches relative to the on-target gRNA protospacer sequence (5′-GGCgACaGAaCGAGACATCT-PAM-3′, PAM=CGG (SEQ ID NO: 10817)) and is located in intron 9 of the epithelial cell-transforming sequence 2 oncogene-like gene (ECT2L) on chromosome 6 at base pair position 138,856,234-138,856,256, approximately 2 kb away from exon 9. Manual inspection of both sites showed typical INDEL patterns surrounding the proposed Cas9 cut sites typical of Cas9 mediated double stranded break non homologous end joining DNA repair. Reamplification and sequencing of both sites gave similar results. It is unclear whether editing at either site identified has any detrimental effect on gene expression or cell viability, further analysis is required.

[1577] gRNA CR00444: The on-target site for gRNA CR00444 showed robust editing at the intended Cas9 cut site in both treated biological replicates with an average INDEL frequency of 84%. No editing was observed in the untreated control sample. Table 31 shows the number of off-target sites successfully characterized. Uncharacterized sites failed in PCR primer design or PCR amplification and are currently still under investigation. To date no significant off-target activity was observed for gRNA CR00444 at sites examined. However, as Table 31 shows, there are still two sites that have not yet been characterized, one with 4 mismatches located in an intergenic region and another with 5 mismatches located in exon 4 of the non-coding dynamin 1 pseudogene 46 gene (DNM1P46). Based on the high number of mismatches in these sites it is expected that these sites will likely not show any significant editing, however further analysis is required to confirm this.

[1578] gRNA CR000961: The on-target site for gRNA CR000961 showed robust editing at the intended Cas9 cut site in both treated biological replicates with an average INDEL frequency of 81%. No editing was observed in the untreated control sample. Table 31 shows the number of off-target sites successfully characterized. Uncharacterized sites failed in PCR primer design or PCR amplification and are currently still under investigation. Characterization of potential off-target sites identified one weak off-target site for gRNA CR000961 with an average INDEL frequency of 5.5% in the 100 bp window around the proposed Cas9 cut site. The site has 3 mismatches relative to the gRNA protospacer sequence (5′-AaAGTCaCaCAGCTGGTACA-PAM-3′, PAM=TGG (SEQ ID NO: 10818)) and is located in intron 12 of the doublecortin domain-containing protein 1 gene (DCDC1) on chromosome 11 at base pair position 31,102,920-31,102,942, approximately 0.6 kb away from exon 13. Manual inspection of the site showed typical INDEL patterns surrounding the proposed Cas9 cut sites typical of Cas9 mediated double stranded break non homologous end joining DNA repair. Reamplification and sequencing of the site gave similar results. It is unclear whether editing at this site has any detrimental effect on gene expression or cell viability, however further analysis is required.

[1579] gRNA CR000984: The on-target site for gRNA CR000984 showed robust editing at the intended Cas9 cut site in both treated biological replicates with an average INDEL frequency of 98%. No editing was observed in the untreated control sample. Table 31 the shows the number of off-target sites successfully characterized. Uncharacterized sites failed in PCR primer design or PCR amplification and are currently still under investigation. Characterization of off-target sites identified no significant off-target activity for gRNA CR000984 at sites examined. However, as Table 31 shows, there is still one site that has not yet been characterized. The site has 5 mismatches and is located in an exon of an uncharacterized long non-coding RNA (LOC440896). Based on the high number of mismatches it is expected that this site will likely not show any significant editing, however further analysis is required to confirm this.

TABLE 31
Counts of total number of potential off-target sites,
number of successfully characterized off-target sites
and number of active off- target sites identified for
gRNAs CR00442, CR00444, CR000961 and CR000984 are shown.

| | | Total | Number of | Number of |
|---|---|---|---|---|
| | Targeting | number of | off-target | active |
| | domain | off-target | sites | off-target |
| Gene | gRNA name | sites | characterized | sites identified |
| B2M | CR00442 | 150 | 147 (98%) | 2 |
| | CR00444 | 59 | 57 (97%) | 0 |
| TRAC | CR000961 | 312 | 306 (98%) | 1 |
| | CR000984 | 58 | 57 (98%) | 0 |

### GUIDE-Seq Hit Validation Results

[1580] Potential off-target loci identified using the GUIDE-seq method (Tsai et al, Nat Biotechnol. 2015, 33(2):187-97, PMID: 25513782) were characterized in RNP treated and untreated T cells using the same methods described for in silico identified sites. GUIDE-Seq identified 2 potential sites for gRNA CR00442, 1 potential site for CR00444 and 1 potential site for gRNA CR000984. No active sites were identified for gRNA CR000961. Target sequencing analysis of all potential GUIDE-seq sites showed no significant activity in RNP treated T cells tested.

### Off-Target Editing Assessment by Insertional Analysis

[1581] An oligo insertion based assay (See, e.g., Tsai et al., Nature Biotechnology. 33, 187-197; 2015) was used to determine potential off-target genomic sites cleaved by Cas9 targeting B2M TRAC, TRBC2, PDCD1, CIITA, and FKBP1A. A total of 34 guideRNAs (dual guide RNAs comprising the indicated targeting domain, modified or unmodified, as indicated) targeting B2M (5), TRAC (9), TRBC2 (2), PDCD1 (8), FKBP1A (5), or CIITA (5) were screened in the Cas9-expressing HEK293 cells described above in Example 1, and the results are plotted in FIG. 63 and FIG. 64. The assay detected high-efficiency editing at the expected target sequences. No off-target editing was observed for the B2M-targeting gRNA comprising the targeting domain of CR00444 or the targeting domain of CR00441, and only a single very low-efficiency off-target edit was detected using the B2M-targeting gRNA comprising the targeting domain of CR00442. The results show that for gRNAs targeting TRAC comprising the targeting domain of CR00961, CR00978, CR00984, CR00991 and CR00992, each resulted in high-efficiency editing of the target sequence without editing at any off-target location. As well, no off-target editing was detected for the PDCD1-targeting gRNA comprising the targeting domain of CR00902. With respect to gRNA molecules which demonstrated potential off-target editing in this assay, deep sequencing will be used to determine whether the potential sites are bona fide off-target sites cleaved by Cas9. As well, any potential off-target edit will be assessed for presence and frequency in T-cells.

### Example 18: Editing of CD3 Delta and CD3 Gamma in Primary Human CD3+ Cells

[1582] Editing of CRISPR systems containing dgRNA molecules comprising targeting domains to sequences of CD3 delta and CD3 gamma were tested for editing in primary CD3+ T cells (gRNA/Cas9 RNP delivered by electroporation) according to the methods described herein. Surface expression of CD3 after editing was assayed by flow cytometry. Briefly, edited CD3+ cells were stained with antibodies against CD3 (OKT3, BioLegend) at day 7 post-electroporation. Expression of CD3 in live cells (identified using 7AAD exclusion) relative to the un-edited controls was used to determine frequency of RNP editing. The results are reported in FIG. 65 and FIG. 66, which include flow cytometry data showing the % editing in primary human CD3+ T cells as measured by loss of surface expression of CD3. Notably, the dgRNA comprising the targeting domain of CR005334 resulted in 98% loss of CD3.

[1583] The present invention is not to be limited in scope by the exemplified constructs, since the exemplified embodiments are intended to illustrate only certain aspects of the invention and any constructs that are functionally equivalent are within the scope of this invention. Various modifications of the invention in addition to those shown and described herein will become apparent to those skilled in the art from the foregoing description and fall within the scope of the appended claims.

[1584] It is understood that the application of the teachings of the present invention to a specific problem or situation will be within the capabilities of one having ordinary skill in the art in light of the teachings contained herein.

[1585] The disclosures of each and every citation in the specification are expressly incorporated herein by reference.

[1586] This application is being filed with a sequence listing. To the extent there are any discrepancies between the sequence listing and any sequence recited in the specification, the sequence recited in the specification should be considered the correct sequence. Unless otherwise indicated, all genomic locations are according to hg38.

LENGTHY TABLES
The patent application contains a lengthy table section. A copy of the table is available in electronic form from the USPTO web site (https://seqdata.uspto.gov/?pageRequest=docDetail&DocID=US20240417722A1). An electronic copy of the table will also be available from the USPTO upon request and payment of the fee set forth in 37 CFR 1.19(b)(3).

The application's sequence listing, which the Patent Office published only in electronic form, follows.

SEQUENCE LISTING (11159 sequences)

SEQ ID NO: 1 - RNA, 25 nt, Homo sapiens
  source 1..25: mol_type = unassigned RNA
tggctgggcacgcgtttaatataag

SEQ ID NO: 2 - RNA, 25 nt, Homo sapiens
  source 1..25: mol_type = unassigned RNA
ctgggcacgcgtttaatataagtgg

SEQ ID NO: 3 - RNA, 25 nt, Homo sapiens
  source 1..25: mol_type = unassigned RNA
tttaatataagtggaggcgtcgcgc

SEQ ID NO: 4 - RNA, 25 nt, Homo sapiens
  source 1..25: mol_type = unassigned RNA
aatataagtggaggcgtcgcgctgg

SEQ ID NO: 5 - RNA, 25 nt, Homo sapiens
  source 1..25: mol_type = unassigned RNA
atataagtggaggcgtcgcgctggc

SEQ ID NO: 6 - RNA, 25 nt, Homo sapiens
  source 1..25: mol_type = unassigned RNA
gggcattcctgaagctgacagcatt

SEQ ID NO: 7 - RNA, 25 nt, Homo sapiens
  source 1..25: mol_type = unassigned RNA
ggcattcctgaagctgacagcattc

SEQ ID NO: 8 - RNA, 25 nt, Homo sapiens
  source 1..25: mol_type = unassigned RNA
attcgggccgagatgtctcgctccg

SEQ ID NO: 9 - RNA, 25 nt, Homo sapiens
  source 1..25: mol_type = unassigned RNA
ctgtgctcgcgctactctctctttc

SEQ ID NO: 10 - RNA, 25 nt, Homo sapiens
  source 1..25: mol_type = unassigned RNA
ctcgcgctactctctctttctggcc

SEQ ID NO: 11 - RNA, 25 nt, Homo sapiens
  source 1..25: mol_type = unassigned RNA
gcgctactctctctttctggcctgg

SEQ ID NO: 12 - RNA, 25 nt, Homo sapiens
  source 1..25: mol_type = unassigned RNA
atattaaacgcgtgcccagccaatc

SEQ ID NO: 13 - RNA, 25 nt, Homo sapiens
  source 1..25: mol_type = unassigned RNA
tctcggcccgaatgctgtcagcttc

SEQ ID NO: 14 - RNA, 25 nt, Homo sapiens
  source 1..25: mol_type = unassigned RNA
gctaaggccacggagcgagacatct

SEQ ID NO: 15 - RNA, 25 nt, Homo sapiens
  source 1..25: mol_type = unassigned RNA
agtagcgcgagcacagctaaggcca

SEQ ID NO: 16 - RNA, 25 nt, Homo sapiens
  source 1..25: mol_type = unassigned RNA
agagagagtagcgcgagcacagcta

SEQ ID NO: 17 - RNA, 25 nt, Homo sapiens
  source 1..25: mol_type = unassigned RNA
gagagactcacgctggatagcctcc

SEQ ID NO: 18 - RNA, 25 nt, Homo sapiens
  source 1..25: mol_type = unassigned RNA
gcgggagggtaggagagactcacgc

SEQ ID NO: 19 - RNA, 25 nt, Homo sapiens
  source 1..25: mol_type = unassigned RNA
tattcctcaggtactccaaagattc

SEQ ID NO: 20 - RNA, 25 nt, Homo sapiens
  source 1..25: mol_type = unassigned RNA
tttactcacgtcatccagcagagaa

SEQ ID NO: 21 - RNA, 25 nt, Homo sapiens
  source 1..25: mol_type = unassigned RNA
caaatttcctgaattgctatgtgtc

SEQ ID NO: 22 - RNA, 25 nt, Homo sapiens
  source 1..25: mol_type = unassigned RNA
aaatttcctgaattgctatgtgtct

SEQ ID NO: 23 - RNA, 25 nt, Homo sapiens
  source 1..25: mol_type = unassigned RNA
acattgaagttgacttactgaagaa

SEQ ID NO: 24 - RNA, 25 nt, Homo sapiens
  source 1..25: mol_type = unassigned RNA
aagaatggagagagaattgaaaaag

SEQ ID NO: 25 - RNA, 25 nt, Homo sapiens
  source 1..25: mol_type = unassigned RNA
gagcattcagacttgtctttcagca

SEQ ID NO: 26 - RNA, 25 nt, Homo sapiens
  source 1..25: mol_type = unassigned RNA
ttcagacttgtctttcagcaaggac

SEQ ID NO: 27 - RNA, 25 nt, Homo sapiens
  source 1..25: mol_type = unassigned RNA
tttgtcacagcccaagatagttaag

SEQ ID NO: 28 - RNA, 25 nt, Homo sapiens
  source 1..25: mol_type = unassigned RNA
ttgtcacagcccaagatagttaagt

SEQ ID NO: 29 - RNA, 25 nt, Homo sapiens
  source 1..25: mol_type = unassigned RNA
tgtcacagcccaagatagttaagtg

SEQ ID NO: 30 - RNA, 25 nt, Homo sapiens
  source 1..25: mol_type = unassigned RNA
atctttggagtacctgaggaatatc

SEQ ID NO: 31 - RNA, 25 nt, Homo sapiens
  source 1..25: mol_type = unassigned RNA
aatctttggagtacctgaggaatat

SEQ ID NO: 32 - RNA, 25 nt, Homo sapiens
  source 1..25: mol_type = unassigned RNA
taaacctgaatctttggagtacctg

SEQ ID NO: 33 - RNA, 25 nt, Homo sapiens
  source 1..25: mol_type = unassigned RNA
gatgacgtgagtaaacctgaatctt

SEQ ID NO: 34 - RNA, 25 nt, Homo sapiens
  source 1..25: mol_type = unassigned RNA
ggaaatttgactttccattctctgc

SEQ ID NO: 35 - RNA, 25 nt, Homo sapiens
  source 1..25: mol_type = unassigned RNA
atgaaacccagacacatagcaattc

SEQ ID NO: 36 - RNA, 25 nt, Homo sapiens
  source 1..25: mol_type = unassigned RNA
tcagtaagtcaacttcaatgtcgga

SEQ ID NO: 37 - RNA, 25 nt, Homo sapiens
  source 1..25: mol_type = unassigned RNA
ttcttcagtaagtcaacttcaatgt

SEQ ID NO: 38 - RNA, 25 nt, Homo sapiens
  source 1..25: mol_type = unassigned RNA
caggcatactcatctttttcagtgg

SEQ ID NO: 39 - RNA, 25 nt, Homo sapiens
  source 1..25: mol_type = unassigned RNA
gcaggcatactcatctttttcagtg

SEQ ID NO: 40 - RNA, 25 nt, Homo sapiens
  source 1..25: mol_type = unassigned RNA
ggcaggcatactcatctttttcagt

SEQ ID NO: 41 - RNA, 25 nt, Homo sapiens
  source 1..25: mol_type = unassigned RNA
cggcaggcatactcatctttttcag

SEQ ID NO: 42 - RNA, 25 nt, Homo sapiens
  source 1..25: mol_type = unassigned RNA
gacaaagtcacatggttcacacggc

SEQ ID NO: 43 - RNA, 25 nt, Homo sapiens
  source 1..25: mol_type = unassigned RNA
ctgtgacaaagtcacatggttcaca

SEQ ID NO: 44 - RNA, 25 nt, Homo sapiens
  source 1..25: mol_type = unassigned RNA
tatcttgggctgtgacaaagtcaca

SEQ ID NO: 45 - RNA, 25 nt, Homo sapiens
  source 1..25: mol_type = unassigned RNA
aagacttaccccacttaactatctt

SEQ ID NO: 46 - RNA, 25 nt, Homo sapiens
  source 1..25: mol_type = unassigned RNA
taagacttaccccacttaactatct

SEQ ID NO: 47 - RNA, 25 nt, Homo sapiens
  source 1..25: mol_type = unassigned RNA
agatcgagacatgtaagcagcatca

SEQ ID NO: 48 - RNA, 25 nt, Homo sapiens
  source 1..25: mol_type = unassigned RNA
tcgagacatgtaagcagcatcatgg

SEQ ID NO: 49 - RNA, 25 nt, Homo sapiens
  source 1..25: mol_type = unassigned RNA
atgtctcgatctatgaaaaagacag

SEQ ID NO: 50 - RNA, 25 nt, Homo sapiens
  source 1..25: mol_type = unassigned RNA
ttttcaggtttgaagatgccgcatt

SEQ ID NO: 51 - RNA, 25 nt, Homo sapiens
  source 1..25: mol_type = unassigned RNA
aggtttgaagatgccgcatttggat

SEQ ID NO: 52 - RNA, 25 nt, Homo sapiens
  source 1..25: mol_type = unassigned RNA
cacttacactttatgcacaaaatgt

SEQ ID NO: 53 - RNA, 25 nt, Homo sapiens
  source 1..25: mol_type = unassigned RNA
acttacactttatgcacaaaatgta

SEQ ID NO: 54 - RNA, 25 nt, Homo sapiens
  source 1..25: mol_type = unassigned RNA
atgtagggttataataatgttaaca

SEQ ID NO: 55 - RNA, 25 nt, Homo sapiens
  source 1..25: mol_type = unassigned RNA
gtctccatgtttgatgtatctgagc

SEQ ID NO: 56 - RNA, 25 nt, Homo sapiens
  source 1..25: mol_type = unassigned RNA
gatgtatctgagcaggttgctccac

SEQ ID NO: 57 - RNA, 25 nt, Homo sapiens
  source 1..25: mol_type = unassigned RNA
agcaggttgctccacaggtagctct

SEQ ID NO: 58 - RNA, 25 nt, Homo sapiens
  source 1..25: mol_type = unassigned RNA
aggttgctccacaggtagctctagg

SEQ ID NO: 59 - RNA, 25 nt, Homo sapiens
  source 1..25: mol_type = unassigned RNA
ggttgctccacaggtagctctagga

SEQ ID NO: 60 - RNA, 25 nt, Homo sapiens
  source 1..25: mol_type = unassigned RNA
gctccacaggtagctctaggagggc

SEQ ID NO: 61 - RNA, 25 nt, Homo sapiens
  source 1..25: mol_type = unassigned RNA
agctctaggagggctggcaacttag

SEQ ID NO: 62 - RNA, 25 nt, Homo sapiens
  source 1..25: mol_type = unassigned RNA
tctaggagggctggcaacttagagg

SEQ ID NO: 63 - RNA, 25 nt, Homo sapiens
  source 1..25: mol_type = unassigned RNA
ctaggagggctggcaacttagaggt

SEQ ID NO: 64 - RNA, 25 nt, Homo sapiens
  source 1..25: mol_type = unassigned RNA
taggagggctggcaacttagaggtg

SEQ ID NO: 65 - RNA, 25 nt, Homo sapiens
  source 1..25: mol_type = unassigned RNA
attctcttatccaacatcaacatct

SEQ ID NO: 66 - RNA, 25 nt, Homo sapiens
  source 1..25: mol_type = unassigned RNA
caatttacatactctgcttagaatt

SEQ ID NO: 67 - RNA, 25 nt, Homo sapiens
  source 1..25: mol_type = unassigned RNA
aatttacatactctgcttagaattt

SEQ ID NO: 68 - RNA, 25 nt, Homo sapiens
  source 1..25: mol_type = unassigned RNA
atttacatactctgcttagaatttg

SEQ ID NO: 69 - RNA, 25 nt, Homo sapiens
  source 1..25: mol_type = unassigned RNA
tttacatactctgcttagaatttgg

SEQ ID NO: 70 - RNA, 25 nt, Homo sapiens
  source 1..25: mol_type = unassigned RNA
gggaaaatttagaaatataattgac

SEQ ID NO: 71 - RNA, 25 nt, Homo sapiens
  source 1..25: mol_type = unassigned RNA
ttagaaatataattgacaggattat

SEQ ID NO: 72 - RNA, 25 nt, Homo sapiens
  source 1..25: mol_type = unassigned RNA
tacttcttatacatttgataaagta

SEQ ID NO: 73 - RNA, 25 nt, Homo sapiens
  source 1..25: mol_type = unassigned RNA
cttatacatttgataaagtaaggca

SEQ ID NO: 74 - RNA, 25 nt, Homo sapiens
  source 1..25: mol_type = unassigned RNA
catttgataaagtaaggcatggttg

SEQ ID NO: 75 - RNA, 25 nt, Homo sapiens
  source 1..25: mol_type = unassigned RNA
aagtaaggcatggttgtggttaatc

SEQ ID NO: 76 - RNA, 25 nt, Homo sapiens
  source 1..25: mol_type = unassigned RNA
cttcaaacctgaaaagaaaagaaaa

SEQ ID NO: 77 - RNA, 25 nt, Homo sapiens
  source 1..25: mol_type = unassigned RNA
atttggaattcatccaatccaaatg

SEQ ID NO: 78 - RNA, 25 nt, Homo sapiens
  source 1..25: mol_type = unassigned RNA
tattaaaaagcaagcaagcagaatt

SEQ ID NO: 79 - RNA, 25 nt, Homo sapiens
  source 1..25: mol_type = unassigned RNA
gcaacctgctcagatacatcaaaca

SEQ ID NO: 80 - RNA, 25 nt, Homo sapiens
  source 1..25: mol_type = unassigned RNA
ttgccagccctcctagagctacctg

SEQ ID NO: 81 - RNA, 25 nt, Homo sapiens
  source 1..25: mol_type = unassigned RNA
tcaaatctgaccaagatgttgatgt

SEQ ID NO: 82 - RNA, 25 nt, Homo sapiens
  source 1..25: mol_type = unassigned RNA
caaattctaagcagagtatgtaaat

SEQ ID NO: 83 - RNA, 25 nt, Homo sapiens
  source 1..25: mol_type = unassigned RNA
caagttttatgatttatttaacttg

SEQ ID NO: 84 - RNA, 25 nt, Homo sapiens
  source 1..25: mol_type = unassigned RNA
cactgaagcatttattatgcaaaat

SEQ ID NO: 85 - RNA, 25 nt, Homo sapiens
  source 1..25: mol_type = unassigned RNA
gaagcatttattatgcaaaatagga

SEQ ID NO: 86 - RNA, 25 nt, Homo sapiens
  source 1..25: mol_type = unassigned RNA
cagagtagagagcgttttccatcca

SEQ ID NO: 87 - RNA, 25 nt, Homo sapiens
  source 1..25: mol_type = unassigned RNA
acgcagcagtatcctagtacattga

SEQ ID NO: 88 - RNA, 25 nt, Homo sapiens
  source 1..25: mol_type = unassigned RNA
cgcagcagtatcctagtacattgac

SEQ ID NO: 89 - RNA, 25 nt, Homo sapiens
  source 1..25: mol_type = unassigned RNA
tttttcctgtcctgccactgtccgc

SEQ ID NO: 90 - RNA, 25 nt, Homo sapiens
  source 1..25: mol_type = unassigned RNA
ttttcctgtcctgccactgtccgct

SEQ ID NO: 91 - RNA, 25 nt, Homo sapiens
  source 1..25: mol_type = unassigned RNA
ctgccactgtccgctgggcagttat

SEQ ID NO: 92 - RNA, 25 nt, Homo sapiens
  source 1..25: mol_type = unassigned RNA
ctgggcagttataggtcccatgtgt

SEQ ID NO: 93 - RNA, 25 nt, Homo sapiens
  source 1..25: mol_type = unassigned RNA
tgggcagttataggtcccatgtgtt

SEQ ID NO: 94 - RNA, 25 nt, Homo sapiens
  source 1..25: mol_type = unassigned RNA
gtcccatgtgttgggtcttcctgcg

SEQ ID NO: 95 - RNA, 25 nt, Homo sapiens
  source 1..25: mol_type = unassigned RNA
tcgctgaaagcgtgaagtgaatcaa

SEQ ID NO: 96 - RNA, 25 nt, Homo sapiens
  source 1..25: mol_type = unassigned RNA
atgccactttgtgcacagctcatca

SEQ ID NO: 97 - RNA, 25 nt, Homo sapiens
  source 1..25: mol_type = unassigned RNA
catcaaggtcagtctgttcatcttc

SEQ ID NO: 98 - RNA, 25 nt, Homo sapiens
  source 1..25: mol_type = unassigned RNA
ttcatcttctggcccctgtagcaca

SEQ ID NO: 99 - RNA, 25 nt, Homo sapiens
  source 1..25: mol_type = unassigned RNA
ccctgtagcacatggtacagttcaa

SEQ ID NO: 100 - RNA, 25 nt, Homo sapiens
  source 1..25: mol_type = unassigned RNA
tagcacatggtacagttcaatggtg

SEQ ID NO: 101 - RNA, 25 nt, Homo sapiens
  source 1..25: mol_type = unassigned RNA
ggtacagttcaatggtgcggcacag

SEQ ID NO: 102 - RNA, 25 nt, Homo sapiens
  source 1..25: mol_type = unassigned RNA
ttcaatggtgcggcacagaggcctg

SEQ ID NO: 103 - RNA, 25 nt, Homo sapiens
  source 1..25: mol_type = unassigned RNA
atggtgcggcacagaggcctgaggc

SEQ ID NO: 104 - RNA, 25 nt, Homo sapiens
  source 1..25: mol_type = unassigned RNA
tggtgcggcacagaggcctgaggca

SEQ ID NO: 105 - RNA, 25 nt, Homo sapiens
  source 1..25: mol_type = unassigned RNA
tgcggcacagaggcctgaggcaggg

SEQ ID NO: 106 - RNA, 25 nt, Homo sapiens
  source 1..25: mol_type = unassigned RNA
gcagggaggctcccgctgccctcgc

SEQ ID NO: 107 - RNA, 25 nt, Homo sapiens
  source 1..25: mol_type = unassigned RNA
aggctcccgctgccctcgcaggccc

SEQ ID NO: 108 - RNA, 25 nt, Homo sapiens
  source 1..25: mol_type = unassigned RNA
accttcccatgcccctgcagctccc

SEQ ID NO: 109 - RNA, 25 nt, Homo sapiens
  source 1..25: mol_type = unassigned RNA
gcccctgcagctccctggttgcacc

SEQ ID NO: 110 - RNA, 25 nt, Homo sapiens
  source 1..25: mol_type = unassigned RNA
gcagctccctggttgcacctggcct

SEQ ID NO: 111 - RNA, 25 nt, Homo sapiens
  source 1..25: mol_type = unassigned RNA
gctcctttccatctgcccctctgcc

SEQ ID NO: 112 - RNA, 25 nt, Homo sapiens
  source 1..25: mol_type = unassigned RNA
tgcccctctgcccggccctctcacc

SEQ ID NO: 113 - RNA, 25 nt, Homo sapiens
  source 1..25: mol_type = unassigned RNA
gcccctctgcccggccctctcacca

SEQ ID NO: 114 - RNA, 25 nt, Homo sapiens
  source 1..25: mol_type = unassigned RNA
cctctgcccggccctctcaccaggg

SEQ ID NO: 115 - RNA, 25 nt, Homo sapiens
  source 1..25: mol_type = unassigned RNA
gccctctcaccagggaggcacaaca

SEQ ID NO: 116 - RNA, 25 nt, Homo sapiens
  source 1..25: mol_type = unassigned RNA
catggcccagtacagttaccttgaa

SEQ ID NO: 117 - RNA, 25 nt, Homo sapiens
  source 1..25: mol_type = unassigned RNA
ggcccagtacagttaccttgaaagg

SEQ ID NO: 118 - RNA, 25 nt, Homo sapiens
  source 1..25: mol_type = unassigned RNA
gtacagttaccttgaaaggaggtga

SEQ ID NO: 119 - RNA, 25 nt, Homo sapiens
  source 1..25: mol_type = unassigned RNA
tgacaacagaagccaaatttacagc

SEQ ID NO: 120 - RNA, 25 nt, Homo sapiens
  source 1..25: mol_type = unassigned RNA
tcagacacagagtgatacagacatt

SEQ ID NO: 121 - RNA, 25 nt, Homo sapiens
  source 1..25: mol_type = unassigned RNA
cagacacagagtgatacagacatta

SEQ ID NO: 122 - RNA, 25 nt, Homo sapiens
  source 1..25: mol_type = unassigned RNA
catgtgctagcatctgcgctttctc

SEQ ID NO: 123 - RNA, 25 nt, Homo sapiens
  source 1..25: mol_type = unassigned RNA
atgtgctagcatctgcgctttctct

SEQ ID NO: 124 - RNA, 25 nt, Homo sapiens
  source 1..25: mol_type = unassigned RNA
tgtgctagcatctgcgctttctctg

SEQ ID NO: 125 - RNA, 25 nt, Homo sapiens
  source 1..25: mol_type = unassigned RNA
acagactcaacaactcagctgtgag

SEQ ID NO: 126 - RNA, 25 nt, Homo sapiens
  source 1..25: mol_type = unassigned RNA
gtgagaggcagtgcgcccgcctccc

SEQ ID NO: 127 - RNA, 25 nt, Homo sapiens
  source 1..25: mol_type = unassigned RNA
tgagaggcagtgcgcccgcctccca

SEQ ID NO: 128 - RNA, 25 nt, Homo sapiens
  source 1..25: mol_type = unassigned RNA
gtgcgcccgcctcccagggagaacg

SEQ ID NO: 129 - RNA, 25 nt, Homo sapiens
  source 1..25: mol_type = unassigned RNA
ctcccagggagaacgaggaaccgcc

SEQ ID NO: 130 - RNA, 25 nt, Homo sapiens
  source 1..25: mol_type = unassigned RNA
ggagaacgaggaaccgccaggagac

SEQ ID NO: 131 - RNA, 25 nt, Homo sapiens
  source 1..25: mol_type = unassigned RNA
caggagacaggtctacctgcaccac

SEQ ID NO: 132 - RNA, 25 nt, Homo sapiens
  source 1..25: mol_type = unassigned RNA
tctacctgcaccaccggcaaaccag

SEQ ID NO: 133 - RNA, 25 nt, Homo sapiens
  source 1..25: mol_type = unassigned RNA
ctacctgcaccaccggcaaaccaga

SEQ ID NO: 134 - RNA, 25 nt, Homo sapiens
  source 1..25: mol_type = unassigned RNA
caccaccggcaaaccagagggccca

SEQ ID NO: 135 - RNA, 25 nt, Homo sapiens
  source 1..25: mol_type = unassigned RNA
ccggcaaaccagagggcccaaggcc

SEQ ID NO: 136 - RNA, 25 nt, Homo sapiens
  source 1..25: mol_type = unassigned RNA
cggcaaaccagagggcccaaggcca

SEQ ID NO: 137 - RNA, 25 nt, Homo sapiens
  source 1..25: mol_type = unassigned RNA
ggcccaaggccagggccgtaagccc

SEQ ID NO: 138 - RNA, 25 nt, Homo sapiens
  source 1..25: mol_type = unassigned RNA
gcccaaggccagggccgtaagccct

SEQ ID NO: 139 - RNA, 25 nt, Homo sapiens
  source 1..25: mol_type = unassigned RNA
gggagtacactcccttaaagagtgc

SEQ ID NO: 140 - RNA, 25 nt, Homo sapiens
  source 1..25: mol_type = unassigned RNA
ggagtacactcccttaaagagtgca

SEQ ID NO: 141 - RNA, 25 nt, Homo sapiens
  source 1..25: mol_type = unassigned RNA
tgcagggacaacagtctgtgtgtga

SEQ ID NO: 142 - RNA, 25 nt, Homo sapiens
  source 1..25: mol_type = unassigned RNA
ggacaacagtctgtgtgtgaaggtt

SEQ ID NO: 143 - RNA, 25 nt, Homo sapiens
  source 1..25: mol_type = unassigned RNA
tataaccaaagcatcctgtacataa

SEQ ID NO: 144 - RNA, 25 nt, Homo sapiens
  source 1..25: mol_type = unassigned RNA
ataaccaaagcatcctgtacataaa

SEQ ID NO: 145 - RNA, 25 nt, Homo sapiens
  source 1..25: mol_type = unassigned RNA
taaccaaagcatcctgtacataaag

SEQ ID NO: 146 - RNA, 25 nt, Homo sapiens
  source 1..25: mol_type = unassigned RNA
ctgtacataaaggggaatacttcag

SEQ ID NO: 147 - RNA, 25 nt, Homo sapiens
  source 1..25: mol_type = unassigned RNA
acttcagtggctgagaagagtgaac

SEQ ID NO: 148 - RNA, 25 nt, Homo sapiens
  source 1..25: mol_type = unassigned RNA
cttcagtggctgagaagagtgaacc

SEQ ID NO: 149 - RNA, 25 nt, Homo sapiens
  source 1..25: mol_type = unassigned RNA
atgcttcatcctgtgtctcataatc

SEQ ID NO: 150 - RNA, 25 nt, Homo sapiens
  source 1..25: mol_type = unassigned RNA
tgcttcatcctgtgtctcataatct

SEQ ID NO: 151 - RNA, 25 nt, Homo sapiens
  source 1..25: mol_type = unassigned RNA
tgtgtctcataatctgggcgtctgc

SEQ ID NO: 152 - RNA, 25 nt, Homo sapiens
  source 1..25: mol_type = unassigned RNA
ctcataatctgggcgtctgcaggtc

SEQ ID NO: 153 - RNA, 25 nt, Homo sapiens
  source 1..25: mol_type = unassigned RNA
ggcgtctgcaggtctggcctttgag

SEQ ID NO: 154 - RNA, 25 nt, Homo sapiens
  source 1..25: mol_type = unassigned RNA
ctggcctttgagtggtgaaatcccc

SEQ ID NO: 155 - RNA, 25 nt, Homo sapiens
  source 1..25: mol_type = unassigned RNA
tggtgaaatcccctggctgttagcg

SEQ ID NO: 156 - RNA, 25 nt, Homo sapiens
  source 1..25: mol_type = unassigned RNA
ggtgaaatcccctggctgttagcga

SEQ ID NO: 157 - RNA, 25 nt, Homo sapiens
  source 1..25: mol_type = unassigned RNA
gtgaaatcccctggctgttagcgag

SEQ ID NO: 158 - RNA, 25 nt, Homo sapiens
  source 1..25: mol_type = unassigned RNA
tgaaatcccctggctgttagcgagg

SEQ ID NO: 159 - RNA, 25 nt, Homo sapiens
  source 1..25: mol_type = unassigned RNA
atcccctggctgttagcgagggggc

SEQ ID NO: 160 - RNA, 25 nt, Homo sapiens
  source 1..25: mol_type = unassigned RNA
tcccctggctgttagcgagggggca

SEQ ID NO: 161 - RNA, 25 nt, Homo sapiens
  source 1..25: mol_type = unassigned RNA
gcgagggggcagggcctgcatgtga

SEQ ID NO: 162 - RNA, 25 nt, Homo sapiens
  source 1..25: mol_type = unassigned RNA
cgagggggcagggcctgcatgtgaa

SEQ ID NO: 163 - RNA, 25 nt, Homo sapiens
  source 1..25: mol_type = unassigned RNA
agggcctgcatgtgaagggcgtcgt

SEQ ID NO: 164 - RNA, 25 nt, Homo sapiens
  source 1..25: mol_type = unassigned RNA
atgtgaagggcgtcgtaggtgtcct

SEQ ID NO: 165 - RNA, 25 nt, Homo sapiens
  source 1..25: mol_type = unassigned RNA
tgaagggcgtcgtaggtgtccttgg

SEQ ID NO: 166 - RNA, 25 nt, Homo sapiens
  source 1..25: mol_type = unassigned RNA
gtccttggtggctgtactgagaccc

SEQ ID NO: 167 - RNA, 25 nt, Homo sapiens
  source 1..25: mol_type = unassigned RNA
ttttttctactgttttaatttatac

SEQ ID NO: 168 - RNA, 25 nt, Homo sapiens
  source 1..25: mol_type = unassigned RNA
gtcattacagggcacaggccatgga

SEQ ID NO: 169 - RNA, 25 nt, Homo sapiens
  source 1..25: mol_type = unassigned RNA
ctgcgtcattacagggcacaggcca

SEQ ID NO: 170 - RNA, 25 nt, Homo sapiens
  source 1..25: mol_type = unassigned RNA
atactgctgcgtcattacagggcac

SEQ ID NO: 171 - RNA, 25 nt, Homo sapiens
  source 1..25: mol_type = unassigned RNA
actaggatactgctgcgtcattaca

SEQ ID NO: 172 - RNA, 25 nt, Homo sapiens
  source 1..25: mol_type = unassigned RNA
tactaggatactgctgcgtcattac

SEQ ID NO: 173 - RNA, 25 nt, Homo sapiens
  source 1..25: mol_type = unassigned RNA
gacaggaaaaacccgtcaatgtact

SEQ ID NO: 174 - RNA, 25 nt, Homo sapiens
  source 1..25: mol_type = unassigned RNA
actgcccagcggacagtggcaggac

SEQ ID NO: 175 - RNA, 25 nt, Homo sapiens
  source 1..25: mol_type = unassigned RNA
ctataactgcccagcggacagtggc

SEQ ID NO: 176 - RNA, 25 nt, Homo sapiens
  source 1..25: mol_type = unassigned RNA
ggacctataactgcccagcggacag

SEQ ID NO: 177 - RNA, 25 nt, Homo sapiens
  source 1..25: mol_type = unassigned RNA
acacatgggacctataactgcccag

SEQ ID NO: 178 - RNA, 25 nt, Homo sapiens
  source 1..25: mol_type = unassigned RNA
ggcctcgcaggaagacccaacacat

SEQ ID NO: 179 - RNA, 25 nt, Homo sapiens
  source 1..25: mol_type = unassigned RNA
aggcctcgcaggaagacccaacaca

SEQ ID NO: 180 - RNA, 25 nt, Homo sapiens
  source 1..25: mol_type = unassigned RNA
aaaatcatctttgtgaaggcctcgc

SEQ ID NO: 181 - RNA, 25 nt, Homo sapiens
  source 1..25: mol_type = unassigned RNA
gcgaatgacaaaatcatctttgtga

SEQ ID NO: 182 - RNA, 25 nt, Homo sapiens
  source 1..25: mol_type = unassigned RNA
gaataaagtgctgcggagcaagagg

SEQ ID NO: 183 - RNA, 25 nt, Homo sapiens
  source 1..25: mol_type = unassigned RNA
tgtgaataaagtgctgcggagcaag

SEQ ID NO: 184 - RNA, 25 nt, Homo sapiens
  source 1..25: mol_type = unassigned RNA
gttacacagtgtgaataaagtgctg

SEQ ID NO: 185 - RNA, 25 nt, Homo sapiens
  source 1..25: mol_type = unassigned RNA
tgcacaaagtggcataaaaaacatg

SEQ ID NO: 186 - RNA, 25 nt, Homo sapiens
  source 1..25: mol_type = unassigned RNA
tgaccttgatgagctgtgcacaaag

SEQ ID NO: 187 - RNA, 25 nt, Homo sapiens
  source 1..25: mol_type = unassigned RNA
cattgaactgtaccatgtgctacag

SEQ ID NO: 188 - RNA, 25 nt, Homo sapiens
  source 1..25: mol_type = unassigned RNA
ccattgaactgtaccatgtgctaca

SEQ ID NO: 189 - RNA, 25 nt, Homo sapiens
  source 1..25: mol_type = unassigned RNA
accattgaactgtaccatgtgctac

SEQ ID NO: 190 - RNA, 25 nt, Homo sapiens
  source 1..25: mol_type = unassigned RNA
agggcagcgggagcctccctgcctc

SEQ ID NO: 191 - RNA, 25 nt, Homo sapiens
  source 1..25: mol_type = unassigned RNA
gtcagccagggcctgcgagggcagc

SEQ ID NO: 192 - RNA, 25 nt, Homo sapiens
  source 1..25: mol_type = unassigned RNA
ggtcagccagggcctgcgagggcag

SEQ ID NO: 193 - RNA, 25 nt, Homo sapiens
  source 1..25: mol_type = unassigned RNA
ggggagggtcagccagggcctgcga

SEQ ID NO: 194 - RNA, 25 nt, Homo sapiens
  source 1..25: mol_type = unassigned RNA
aggggagggtcagccagggcctgcg

SEQ ID NO: 195 - RNA, 25 nt, Homo sapiens
  source 1..25: mol_type = unassigned RNA
tgggcgggcaggggagggtcagcca

SEQ ID NO: 196 - RNA, 25 nt, Homo sapiens
  source 1..25: mol_type = unassigned RNA
gtgggcgggcaggggagggtcagcc

SEQ ID NO: 197 - RNA, 25 nt, Homo sapiens
  source 1..25: mol_type = unassigned RNA
catgggaaggtgggcgggcagggga

SEQ ID NO: 198 - RNA, 25 nt, Homo sapiens
  source 1..25: mol_type = unassigned RNA
gcatgggaaggtgggcgggcagggg

SEQ ID NO: 199 - RNA, 25 nt, Homo sapiens
  source 1..25: mol_type = unassigned RNA
ggggcatgggaaggtgggcgggcag

SEQ ID NO: 200 - RNA, 25 nt, Homo sapiens
  source 1..25: mol_type = unassigned RNA
aggggcatgggaaggtgggcgggca

SEQ ID NO: 201 - RNA, 25 nt, Homo sapiens
  source 1..25: mol_type = unassigned RNA
caggggcatgggaaggtgggcgggc

SEQ ID NO: 202 - RNA, 25 nt, Homo sapiens
  source 1..25: mol_type = unassigned RNA
gctgcaggggcatgggaaggtgggc

SEQ ID NO: 203 - RNA, 25 nt, Homo sapiens
  source 1..25: mol_type = unassigned RNA
agctgcaggggcatgggaaggtggg

SEQ ID NO: 204 - RNA, 25 nt, Homo sapiens
  source 1..25: mol_type = unassigned RNA
gggagctgcaggggcatgggaaggt

SEQ ID NO: 205 - RNA, 25 nt, Homo sapiens
  source 1..25: mol_type = unassigned RNA
agggagctgcaggggcatgggaagg

SEQ ID NO: 206 - RNA, 25 nt, Homo sapiens
  source 1..25: mol_type = unassigned RNA
accagggagctgcaggggcatggga

SEQ ID NO: 207 - RNA, 25 nt, Homo sapiens
  source 1..25: mol_type = unassigned RNA
tgcaaccagggagctgcaggggcat

SEQ ID NO: 208 - RNA, 25 nt, Homo sapiens
  source 1..25: mol_type = unassigned RNA
gtgcaaccagggagctgcaggggca

SEQ ID NO: 209 - RNA, 25 nt, Homo sapiens
  source 1..25: mol_type = unassigned RNA
gccaggtgcaaccagggagctgcag

SEQ ID NO: 210 - RNA, 25 nt, Homo sapiens
  source 1..25: mol_type = unassigned RNA
ggccaggtgcaaccagggagctgca

SEQ ID NO: 211 - RNA, 25 nt, Homo sapiens
  source 1..25: mol_type = unassigned RNA
aggccaggtgcaaccagggagctgc

SEQ ID NO: 212 - RNA, 25 nt, Homo sapiens
  source 1..25: mol_type = unassigned RNA
aaggagcctaggccaggtgcaacca

SEQ ID NO: 213 - RNA, 25 nt, Homo sapiens
  source 1..25: mol_type = unassigned RNA
aaaggagcctaggccaggtgcaacc

SEQ ID NO: 214 - RNA, 25 nt, Homo sapiens
  source 1..25: mol_type = unassigned RNA
gggcagatggaaaggagcctaggcc

SEQ ID NO: 215 - RNA, 25 nt, Homo sapiens
  source 1..25: mol_type = unassigned RNA
cagaggggcagatggaaaggagcct

SEQ ID NO: 216 - RNA, 25 nt, Homo sapiens
  source 1..25: mol_type = unassigned RNA
gggccgggcagaggggcagatggaa

SEQ ID NO: 217 - RNA, 25 nt, Homo sapiens
  source 1..25: mol_type = unassigned RNA
tgagagggccgggcagaggggcaga

SEQ ID NO: 218 - RNA, 25 nt, Homo sapiens
  source 1..25: mol_type = unassigned RNA
tccctggtgagagggccgggcagag

SEQ ID NO: 219 - RNA, 25 nt, Homo sapiens
  source 1..25: mol_type = unassigned RNA
ctccctggtgagagggccgggcaga

SEQ ID NO: 220 - RNA, 25 nt, Homo sapiens
  source 1..25: mol_type = unassigned RNA
cctccctggtgagagggccgggcag

SEQ ID NO: 221 - RNA, 25 nt, Homo sapiens
  source 1..25: mol_type = unassigned RNA
gttgtgcctccctggtgagagggcc

SEQ ID NO: 222 - RNA, 25 nt, Homo sapiens
  source 1..25: mol_type = unassigned RNA
tgttgtgcctccctggtgagagggc

SEQ ID NO: 223 - RNA, 25 nt, Homo sapiens
  source 1..25: mol_type = unassigned RNA
gccatgttgtgcctccctggtgaga

SEQ ID NO: 224 - RNA, 25 nt, Homo sapiens
  source 1..25: mol_type = unassigned RNA
ggccatgttgtgcctccctggtgag

SEQ ID NO: 225 - RNA, 25 nt, Homo sapiens
  source 1..25: mol_type = unassigned RNA
tgtactgggccatgttgtgcctccc

SEQ ID NO: 226 - RNA, 25 nt, Homo sapiens
  source 1..25: mol_type = unassigned RNA
cacctcctttcaaggtaactgtact

SEQ ID NO: 227 - RNA, 25 nt, Homo sapiens
  source 1..25: mol_type = unassigned RNA
tcacctcctttcaaggtaactgtac

SEQ ID NO: 228 - RNA, 25 nt, Homo sapiens
  source 1..25: mol_type = unassigned RNA
ctgttgtcaccttcacctcctttca

SEQ ID NO: 229 - RNA, 25 nt, Homo sapiens
  source 1..25: mol_type = unassigned RNA
agtggcttcactcctgctgtaaatt

SEQ ID NO: 230 - RNA, 25 nt, Homo sapiens
  source 1..25: mol_type = unassigned RNA
atgtctgtatcactctgtgtctgag

SEQ ID NO: 231 - RNA, 25 nt, Homo sapiens
  source 1..25: mol_type = unassigned RNA
cggttcctcgttctccctgggaggc

SEQ ID NO: 232 - RNA, 25 nt, Homo sapiens
  source 1..25: mol_type = unassigned RNA
gcggttcctcgttctccctgggagg

SEQ ID NO: 233 - RNA, 25 nt, Homo sapiens
  source 1..25: mol_type = unassigned RNA
ctggcggttcctcgttctccctggg

SEQ ID NO: 234 - RNA, 25 nt, Homo sapiens
  source 1..25: mol_type = unassigned RNA
ctcctggcggttcctcgttctccct

SEQ ID NO: 235 - RNA, 25 nt, Homo sapiens
  source 1..25: mol_type = unassigned RNA
tctcctggcggttcctcgttctccc

SEQ ID NO: 236 - RNA, 25 nt, Homo sapiens
  source 1..25: mol_type = unassigned RNA
tggtgcaggtagacctgtctcctgg

SEQ ID NO: 237 - RNA, 25 nt, Homo sapiens
  source 1..25: mol_type = unassigned RNA
cggtggtgcaggtagacctgtctcc

SEQ ID NO: 238 - RNA, 25 nt, Homo sapiens
  source 1..25: mol_type = unassigned RNA
gggccctctggtttgccggtggtgc

SEQ ID NO: 239 - RNA, 25 nt, Homo sapiens
  source 1..25: mol_type = unassigned RNA
ggccttgggccctctggtttgccgg

SEQ ID NO: 240 - RNA, 25 nt, Homo sapiens
  source 1..25: mol_type = unassigned RNA
cctggccttgggccctctggtttgc

SEQ ID NO: 241 - RNA, 25 nt, Homo sapiens
  source 1..25: mol_type = unassigned RNA
cttacggccctggccttgggccctc

SEQ ID NO: 242 - RNA, 25 nt, Homo sapiens
  source 1..25: mol_type = unassigned RNA
tcccagggcttacggccctggcctt

SEQ ID NO: 243 - RNA, 25 nt, Homo sapiens
  source 1..25: mol_type = unassigned RNA
ctcccagggcttacggccctggcct

SEQ ID NO: 244 - RNA, 25 nt, Homo sapiens
  source 1..25: mol_type = unassigned RNA
agtgtactcccagggcttacggccc

SEQ ID NO: 245 - RNA, 25 nt, Homo sapiens
  source 1..25: mol_type = unassigned RNA
taagggagtgtactcccagggctta

SEQ ID NO: 246 - RNA, 25 nt, Homo sapiens
  source 1..25: mol_type = unassigned RNA
cactctttaagggagtgtactccca

SEQ ID NO: 247 - RNA, 25 nt, Homo sapiens
  source 1..25: mol_type = unassigned RNA
gcactctttaagggagtgtactccc

SEQ ID NO: 248 - RNA, 25 nt, Homo sapiens
  source 1..25: mol_type = unassigned RNA
agactgttgtccctgcactctttaa

SEQ ID NO: 249 - RNA, 25 nt, Homo sapiens
  source 1..25: mol_type = unassigned RNA
cagactgttgtccctgcactcttta

SEQ ID NO: 250 - RNA, 25 nt, Homo sapiens
  source 1..25: mol_type = unassigned RNA
attcccctttatgtacaggatgctt

SEQ ID NO: 251 - RNA, 25 nt, Homo sapiens
  source 1..25: mol_type = unassigned RNA
cactgaagtattcccctttatgtac

SEQ ID NO: 252 - RNA, 25 nt, Homo sapiens
  source 1..25: mol_type = unassigned RNA
gacacaggatgaagcatttacaacc

SEQ ID NO: 253 - RNA, 25 nt, Homo sapiens
  source 1..25: mol_type = unassigned RNA
tgcagacgcccagattatgagacac

SEQ ID NO: 254 - RNA, 25 nt, Homo sapiens
  source 1..25: mol_type = unassigned RNA
acagccaggggatttcaccactcaa

SEQ ID NO: 255 - RNA, 25 nt, Homo sapiens
  source 1..25: mol_type = unassigned RNA
gccctgccccctcgctaacagccag

SEQ ID NO: 256 - RNA, 25 nt, Homo sapiens
  source 1..25: mol_type = unassigned RNA
ggccctgccccctcgctaacagcca

SEQ ID NO: 257 - RNA, 25 nt, Homo sapiens
  source 1..25: mol_type = unassigned RNA
aggccctgccccctcgctaacagcc

SEQ ID NO: 258 - RNA, 25 nt, Homo sapiens
  source 1..25: mol_type = unassigned RNA
gacacctacgacgcccttcacatgc

SEQ ID NO: 259 - RNA, 25 nt, Homo sapiens
  source 1..25: mol_type = unassigned RNA
cgccagggtctcagtacagccacca

SEQ ID NO: 260 - RNA, 25 nt, Homo sapiens
  source 1..25: mol_type = unassigned RNA
tgaagggacgccggcagctcctacc

SEQ ID NO: 261 - RNA, 25 nt, Homo sapiens
  source 1..25: mol_type = unassigned RNA
gacgccggcagctcctacctggtaa

SEQ ID NO: 262 - RNA, 25 nt, Homo sapiens
  source 1..25: mol_type = unassigned RNA
aaggccatcgtgccccttgcccctc

SEQ ID NO: 263 - RNA, 25 nt, Homo sapiens
  source 1..25: mol_type = unassigned RNA
atcgtgccccttgcccctccggcgc

SEQ ID NO: 264 - RNA, 25 nt, Homo sapiens
  source 1..25: mol_type = unassigned RNA
ccttgcccctccggcgctggttgtt

SEQ ID NO: 265 - RNA, 25 nt, Homo sapiens
  source 1..25: mol_type = unassigned RNA
cttgcccctccggcgctggttgttt

SEQ ID NO: 266 - RNA, 25 nt, Homo sapiens
  source 1..25: mol_type = unassigned RNA
atggcctttaccaggtaggagctgc

SEQ ID NO: 267 - RNA, 25 nt, Homo sapiens
  source 1..25: mol_type = unassigned RNA
aggggcacgatggcctttaccaggt

SEQ ID NO: 268 - RNA, 25 nt, Homo sapiens
  source 1..25: mol_type = unassigned RNA
ggcaaggggcacgatggcctttacc

SEQ ID NO: 269 - RNA, 25 nt, Homo sapiens
  source 1..25: mol_type = unassigned RNA
agcgccggaggggcaaggggcacga

SEQ ID NO: 270 - RNA, 25 nt, Homo sapiens
  source 1..25: mol_type = unassigned RNA
aaacaaccagcgccggaggggcaag

SEQ ID NO: 271 - RNA, 25 nt, Homo sapiens
  source 1..25: mol_type = unassigned RNA
caaacaaccagcgccggaggggcaa

SEQ ID NO: 272 - RNA, 25 nt, Homo sapiens
  source 1..25: mol_type = unassigned RNA
ccaaacaaccagcgccggaggggca

SEQ ID NO: 273 - RNA, 25 nt, Homo sapiens
  source 1..25: mol_type = unassigned RNA
cactcccaaacaaccagcgccggag

SEQ ID NO: 274 - RNA, 25 nt, Homo sapiens
  source 1..25: mol_type = unassigned RNA
tcactcccaaacaaccagcgccgga

SEQ ID NO: 275 - RNA, 25 nt, Homo sapiens
  source 1..25: mol_type = unassigned RNA
ttcactcccaaacaaccagcgccgg

SEQ ID NO: 276 - RNA, 25 nt, Homo sapiens
  source 1..25: mol_type = unassigned RNA
catttcactcccaaacaaccagcgc

SEQ ID NO: 277 - RNA, 25 nt, Homo sapiens
  source 1..25: mol_type = unassigned RNA
tcgcctttcatcccaatctcactgt

SEQ ID NO: 278 - RNA, 25 nt, Homo sapiens
  source 1..25: mol_type = unassigned RNA
tatctttctgcagttcctgcagaag

SEQ ID NO: 279 - RNA, 25 nt, Homo sapiens
  source 1..25: mol_type = unassigned RNA
atctttctgcagttcctgcagaaga

SEQ ID NO: 280 - RNA, 25 nt, Homo sapiens
  source 1..25: mol_type = unassigned RNA
tctgcagttcctgcagaagagggcg

SEQ ID NO: 281 - RNA, 25 nt, Homo sapiens
  source 1..25: mol_type = unassigned RNA
tacagtgagattgggatgaaaggcg

SEQ ID NO: 282 - RNA, 25 nt, Homo sapiens
  source 1..25: mol_type = unassigned RNA
aggcctacagtgagattgggatgaa

SEQ ID NO: 283 - RNA, 25 nt, Homo sapiens
  source 1..25: mol_type = unassigned RNA
gatggcggaggcctacagtgagatt

SEQ ID NO: 284 - RNA, 25 nt, Homo sapiens
  source 1..25: mol_type = unassigned RNA
agatggcggaggcctacagtgagat

SEQ ID NO: 285 - RNA, 25 nt, Homo sapiens
  source 1..25: mol_type = unassigned RNA
gaactgcagaaagataagatggcgg

SEQ ID NO: 286 - RNA, 25 nt, Homo sapiens
  source 1..25: mol_type = unassigned RNA
caggaactgcagaaagataagatgg

SEQ ID NO: 287 - RNA, 25 nt, Homo sapiens
  source 1..25: mol_type = unassigned RNA
ctgcaggaactgcagaaagataaga

SEQ ID NO: 288 - RNA, 25 nt, Homo sapiens
  source 1..25: mol_type = unassigned RNA
gaggtctcctctactcacattgtac

SEQ ID NO: 289 - RNA, 25 nt, Homo sapiens
  source 1..25: mol_type = unassigned RNA
tactcacattgtacaggccttcctg

SEQ ID NO: 290 - RNA, 25 nt, Homo sapiens
  source 1..25: mol_type = unassigned RNA
actcacattgtacaggccttcctga

SEQ ID NO: 291 - RNA, 25 nt, Homo sapiens
  source 1..25: mol_type = unassigned RNA
tcctgagggttcttccttctctgct

SEQ ID NO: 292 - RNA, 25 nt, Homo sapiens
  source 1..25: mol_type = unassigned RNA
cttccttctctgctaggaaagacaa

SEQ ID NO: 293 - RNA, 25 nt, Homo sapiens
  source 1..25: mol_type = unassigned RNA
ttccttctctgctaggaaagacaac

SEQ ID NO: 294 - RNA, 25 nt, Homo sapiens
  source 1..25: mol_type = unassigned RNA
aggaaggcctgtacaatgtgagtag

SEQ ID NO: 295 - RNA, 25 nt, Homo sapiens
  source 1..25: mol_type = unassigned RNA
agcagagaaggaagaaccctcagga

SEQ ID NO: 296 - RNA, 25 nt, Homo sapiens
  source 1..25: mol_type = unassigned RNA
tcctagcagagaaggaagaaccctc

SEQ ID NO: 297 - RNA, 25 nt, Homo sapiens
  source 1..25: mol_type = unassigned RNA
ttcccgttgtctttcctagcagaga

SEQ ID NO: 298 - RNA, 25 nt, Homo sapiens
  source 1..25: mol_type = unassigned RNA
cacaggaaggtagaggaacccctac

SEQ ID NO: 299 - RNA, 25 nt, Homo sapiens
  source 1..25: mol_type = unassigned RNA
cccctaccggctttccccccatctc

SEQ ID NO: 300 - RNA, 25 nt, Homo sapiens
  source 1..25: mol_type = unassigned RNA
ccctaccggctttccccccatctca

SEQ ID NO: 301 - RNA, 25 nt, Homo sapiens
  source 1..25: mol_type = unassigned RNA
cggctttccccccatctcagggtcc

SEQ ID NO: 302 - RNA, 25 nt, Homo sapiens
  source 1..25: mol_type = unassigned RNA
cctgagatggggggaaagccggtag

SEQ ID NO: 303 - RNA, 25 nt, Homo sapiens
  source 1..25: mol_type = unassigned RNA
ccctgagatggggggaaagccggta

SEQ ID NO: 304 - RNA, 25 nt, Homo sapiens
  source 1..25: mol_type = unassigned RNA
accctgagatggggggaaagccggt

SEQ ID NO: 305 - RNA, 25 nt, Homo sapiens
  source 1..25: mol_type = unassigned RNA
cgggaccctgagatggggggaaagc

SEQ ID NO: 306 - RNA, 25 nt, Homo sapiens
  source 1..25: mol_type = unassigned RNA
gacgtggccgggaccctgagatggg

SEQ ID NO: 307 - RNA, 25 nt, Homo sapiens
  source 1..25: mol_type = unassigned RNA
agacgtggccgggaccctgagatgg

SEQ ID NO: 308 - RNA, 25 nt, Homo sapiens
  source 1..25: mol_type = unassigned RNA
gagacgtggccgggaccctgagatg

SEQ ID NO: 309 - RNA, 25 nt, Homo sapiens
  source 1..25: mol_type = unassigned RNA
agagacgtggccgggaccctgagat

SEQ ID NO: 310 - RNA, 25 nt, Homo sapiens
  source 1..25: mol_type = unassigned RNA
aagagacgtggccgggaccctgaga

SEQ ID NO: 311 - RNA, 25 nt, Homo sapiens
  source 1..25: mol_type = unassigned RNA
gatgttttggacaagagacgtggcc

SEQ ID NO: 312 - RNA, 25 nt, Homo sapiens
  source 1..25: mol_type = unassigned RNA
cgatgttttggacaagagacgtggc

SEQ ID NO: 313 - RNA, 25 nt, Homo sapiens
  source 1..25: mol_type = unassigned RNA
agtacgatgttttggacaagagacg

SEQ ID NO: 314 - RNA, 25 nt, Homo sapiens
  source 1..25: mol_type = unassigned RNA
ggacgaagagaggagtacgatgttt

SEQ ID NO: 315 - RNA, 25 nt, Homo sapiens
  source 1..25: mol_type = unassigned RNA
taggagctcaatctaggacgaagag

SEQ ID NO: 316 - RNA, 25 nt, Homo sapiens
  source 1..25: mol_type = unassigned RNA
cttatctgttataggagctcaatct

SEQ ID NO: 317 - RNA, 25 nt, Homo sapiens
  source 1..25: mol_type = unassigned RNA
gcgaggctgacttacgttatagagc

SEQ ID NO: 318 - RNA, 25 nt, Homo sapiens
  source 1..25: mol_type = unassigned RNA
ctgacttacgttatagagctggttc

SEQ ID NO: 319 - RNA, 25 nt, Homo sapiens
  source 1..25: mol_type = unassigned RNA
gttatagagctggttctggccctgc

SEQ ID NO: 320 - RNA, 25 nt, Homo sapiens
  source 1..25: mol_type = unassigned RNA
agctggttctggccctgctggtacg

SEQ ID NO: 321 - RNA, 25 nt, Homo sapiens
  source 1..25: mol_type = unassigned RNA
gctggttctggccctgctggtacgc

SEQ ID NO: 322 - RNA, 25 nt, Homo sapiens
  source 1..25: mol_type = unassigned RNA
ctggttctggccctgctggtacgcg

SEQ ID NO: 323 - RNA, 25 nt, Homo sapiens
  source 1..25: mol_type = unassigned RNA
tggttctggccctgctggtacgcgg

SEQ ID NO: 324 - RNA, 25 nt, Homo sapiens
  source 1..25: mol_type = unassigned RNA
gcgcagacgcccccgcgtaccagca

SEQ ID NO: 325 - RNA, 25 nt, Homo sapiens
  source 1..25: mol_type = unassigned RNA
agcgcagacgcccccgcgtaccagc

SEQ ID NO: 326 - RNA, 25 nt, Homo sapiens
  source 1..25: mol_type = unassigned RNA
tttgctttctgtgttgcagttcagc

SEQ ID NO: 327 - RNA, 25 nt, Homo sapiens
  source 1..25: mol_type = unassigned RNA
cccagtggtacccaccttcactctc

SEQ ID NO: 328 - RNA, 25 nt, Homo sapiens
  source 1..25: mol_type = unassigned RNA
gtacccaccttcactctcaggaaca

SEQ ID NO: 329 - RNA, 25 nt, Homo sapiens
  source 1..25: mol_type = unassigned RNA
agtgagaatgacaccatagatgaag

SEQ ID NO: 330 - RNA, 25 nt, Homo sapiens
  source 1..25: mol_type = unassigned RNA
atagatgaagaggattccatccagc

SEQ ID NO: 331 - RNA, 25 nt, Homo sapiens
  source 1..25: mol_type = unassigned RNA
attccatccagcaggtagcagagtt

SEQ ID NO: 332 - RNA, 25 nt, Homo sapiens
  source 1..25: mol_type = unassigned RNA
ttccatccagcaggtagcagagttt

SEQ ID NO: 333 - RNA, 25 nt, Homo sapiens
  source 1..25: mol_type = unassigned RNA
caggtagcagagtttgggatccagc

SEQ ID NO: 334 - RNA, 25 nt, Homo sapiens
  source 1..25: mol_type = unassigned RNA
gtgcctctgtgccaagagataaagc

SEQ ID NO: 335 - RNA, 25 nt, Homo sapiens
  source 1..25: mol_type = unassigned RNA
aaggtgggtaccactgggctttggg

SEQ ID NO: 336 - RNA, 25 nt, Homo sapiens
  source 1..25: mol_type = unassigned RNA
gtgaaggtgggtaccactgggcttt

SEQ ID NO: 337 - RNA, 25 nt, Homo sapiens
  source 1..25: mol_type = unassigned RNA
agtgaaggtgggtaccactgggctt

SEQ ID NO: 338 - RNA, 25 nt, Homo sapiens
  source 1..25: mol_type = unassigned RNA
cctgagagtgaaggtgggtaccact

SEQ ID NO: 339 - RNA, 25 nt, Homo sapiens
  source 1..25: mol_type = unassigned RNA
tcctgagagtgaaggtgggtaccac

SEQ ID NO: 340 - RNA, 25 nt, Homo sapiens
  source 1..25: mol_type = unassigned RNA
ctgccttgttcctgagagtgaaggt

SEQ ID NO: 341 - RNA, 25 nt, Homo sapiens
  source 1..25: mol_type = unassigned RNA
actgccttgttcctgagagtgaagg

SEQ ID NO: 342 - RNA, 25 nt, Homo sapiens
  source 1..25: mol_type = unassigned RNA
ctcactgccttgttcctgagagtga

SEQ ID NO: 343 - RNA, 25 nt, Homo sapiens
  source 1..25: mol_type = unassigned RNA
tgctggatggaatcctcttcatcta

SEQ ID NO: 344 - RNA, 25 nt, Homo sapiens
  source 1..25: mol_type = unassigned RNA
atcccaaactctgctacctgctgga

SEQ ID NO: 345 - RNA, 25 nt, Homo sapiens
  source 1..25: mol_type = unassigned RNA
ctggatcccaaactctgctacctgc

SEQ ID NO: 346 - RNA, 25 nt, Homo sapiens
  source 1..25: mol_type = unassigned RNA
acagaggcacagagctttggcctgc

SEQ ID NO: 347 - RNA, 25 nt, Homo sapiens
  source 1..25: mol_type = unassigned RNA
ctcttggcacagaggcacagagctt

SEQ ID NO: 348 - RNA, 25 nt, Homo sapiens
  source 1..25: mol_type = unassigned RNA
tgaccagctttatctcttggcacag

SEQ ID NO: 349 - RNA, 25 nt, Homo sapiens
  source 1..25: mol_type = unassigned RNA
tcgacacgtcggccctacctgtaat

SEQ ID NO: 350 - RNA, 25 nt, Homo sapiens
  source 1..25: mol_type = unassigned RNA
acctgtaatcggcaactgtgcctgc

SEQ ID NO: 351 - RNA, 25 nt, Homo sapiens
  source 1..25: mol_type = unassigned RNA
gtaatcggcaactgtgcctgcagga

SEQ ID NO: 352 - RNA, 25 nt, Homo sapiens
  source 1..25: mol_type = unassigned RNA
ggcaactgtgcctgcaggatggccg

SEQ ID NO: 353 - RNA, 25 nt, Homo sapiens
  source 1..25: mol_type = unassigned RNA
tcatcttgtcctttccctcagaaag

SEQ ID NO: 354 - RNA, 25 nt, Homo sapiens
  source 1..25: mol_type = unassigned RNA
cttgtcctttccctcagaaagaggc

SEQ ID NO: 355 - RNA, 25 nt, Homo sapiens
  source 1..25: mol_type = unassigned RNA
ttgtcctttccctcagaaagaggct

SEQ ID NO: 356 - RNA, 25 nt, Homo sapiens
  source 1..25: mol_type = unassigned RNA
tcctttccctcagaaagaggctggg

SEQ ID NO: 357 - RNA, 25 nt, Homo sapiens
  source 1..25: mol_type = unassigned RNA
ccctcagaaagaggctgggaggcag

SEQ ID NO: 358 - RNA, 25 nt, Homo sapiens
  source 1..25: mol_type = unassigned RNA
gaaagaggctgggaggcagaggctg

SEQ ID NO: 359 - RNA, 25 nt, Homo sapiens
  source 1..25: mol_type = unassigned RNA
ggctgggaggcagaggctgaggcag

SEQ ID NO: 360 - RNA, 25 nt, Homo sapiens
  source 1..25: mol_type = unassigned RNA
tgggaggcagaggctgaggcagcgg

SEQ ID NO: 361 - RNA, 25 nt, Homo sapiens
  source 1..25: mol_type = unassigned RNA
aggcagaggctgaggcagcggtggc

SEQ ID NO: 362 - RNA, 25 nt, Homo sapiens
  source 1..25: mol_type = unassigned RNA
ggcagaggctgaggcagcggtggcc

SEQ ID NO: 363 - RNA, 25 nt, Homo sapiens
  source 1..25: mol_type = unassigned RNA
gaggctgaggcagcggtggccggga

SEQ ID NO: 364 - RNA, 25 nt, Homo sapiens
  source 1..25: mol_type = unassigned RNA
tgaggcagcggtggccgggacggtt

SEQ ID NO: 365 - RNA, 25 nt, Homo sapiens
  source 1..25: mol_type = unassigned RNA
cggtggccgggacggttaggagaaa

SEQ ID NO: 366 - RNA, 25 nt, Homo sapiens
  source 1..25: mol_type = unassigned RNA
cggttaggagaaaaggagtctctgc

SEQ ID NO: 367 - RNA, 25 nt, Homo sapiens
  source 1..25: mol_type = unassigned RNA
ggttttattctgcagctacctcccc

SEQ ID NO: 368 - RNA, 25 nt, Homo sapiens
  source 1..25: mol_type = unassigned RNA
attctgcagctacctccccaggaag

SEQ ID NO: 369 - RNA, 25 nt, Homo sapiens
  source 1..25: mol_type = unassigned RNA
ctgcagctacctccccaggaagtgg

SEQ ID NO: 370 - RNA, 25 nt, Homo sapiens
  source 1..25: mol_type = unassigned RNA
tacctccccaggaagtggaggactg

SEQ ID NO: 371 - RNA, 25 nt, Homo sapiens
  source 1..25: mol_type = unassigned RNA
acctccccaggaagtggaggactgt

SEQ ID NO: 372 - RNA, 25 nt, Homo sapiens
  source 1..25: mol_type = unassigned RNA
cctccccaggaagtggaggactgtg

SEQ ID NO: 373 - RNA, 25 nt, Homo sapiens
  source 1..25: mol_type = unassigned RNA
ggcctttgagaaagcacctgccgac

SEQ ID NO: 374 - RNA, 25 nt, Homo sapiens
  source 1..25: mol_type = unassigned RNA
gcctttgagaaagcacctgccgaca

SEQ ID NO: 375 - RNA, 25 nt, Homo sapiens
  source 1..25: mol_type = unassigned RNA
caggtagggccgacgtgtcgacggc

SEQ ID NO: 376 - RNA, 25 nt, Homo sapiens
  source 1..25: mol_type = unassigned RNA
attacaggtagggccgacgtgtcga

SEQ ID NO: 377 - RNA, 25 nt, Homo sapiens
  source 1..25: mol_type = unassigned RNA
caggcacagttgccgattacaggta

SEQ ID NO: 378 - RNA, 25 nt, Homo sapiens
  source 1..25: mol_type = unassigned RNA
gcaggcacagttgccgattacaggt

SEQ ID NO: 379 - RNA, 25 nt, Homo sapiens
  source 1..25: mol_type = unassigned RNA
tcctgcaggcacagttgccgattac

SEQ ID NO: 380 - RNA, 25 nt, Homo sapiens
  source 1..25: mol_type = unassigned RNA
gcgcttttcaccgcggccatcctgc

SEQ ID NO: 381 - RNA, 25 nt, Homo sapiens
  source 1..25: mol_type = unassigned RNA
atgaagtggaaggcgcttttcaccg

SEQ ID NO: 382 - RNA, 25 nt, Homo sapiens
  source 1..25: mol_type = unassigned RNA
gagggaaaggacaagatgaagtgga

SEQ ID NO: 383 - RNA, 25 nt, Homo sapiens
  source 1..25: mol_type = unassigned RNA
ttctgagggaaaggacaagatgaag

SEQ ID NO: 384 - RNA, 25 nt, Homo sapiens
  source 1..25: mol_type = unassigned RNA
gcctcccagcctctttctgagggaa

SEQ ID NO: 385 - RNA, 25 nt, Homo sapiens
  source 1..25: mol_type = unassigned RNA
cctctgcctcccagcctctttctga

SEQ ID NO: 386 - RNA, 25 nt, Homo sapiens
  source 1..25: mol_type = unassigned RNA
gcctctgcctcccagcctctttctg

SEQ ID NO: 387 - RNA, 25 nt, Homo sapiens
  source 1..25: mol_type = unassigned RNA
gagactccttttctcctaaccgtcc

SEQ ID NO: 388 - RNA, 25 nt, Homo sapiens
  source 1..25: mol_type = unassigned RNA
ccccacagtcctccacttcctgggg

SEQ ID NO: 389 - RNA, 25 nt, Homo sapiens
  source 1..25: mol_type = unassigned RNA
aggccccacagtcctccacttcctg

SEQ ID NO: 390 - RNA, 25 nt, Homo sapiens
  source 1..25: mol_type = unassigned RNA
aaggccccacagtcctccacttcct

SEQ ID NO: 391 - RNA, 25 nt, Homo sapiens
  source 1..25: mol_type = unassigned RNA
aaaggccccacagtcctccacttcc

SEQ ID NO: 392 - RNA, 25 nt, Homo sapiens
  source 1..25: mol_type = unassigned RNA
gccctgtcggcaggtgctttctcaa

SEQ ID NO: 393 - RNA, 25 nt, Homo sapiens
  source 1..25: mol_type = unassigned RNA
agcccaggcacctgctgagtgaaag

SEQ ID NO: 394 - RNA, 25 nt, Homo sapiens
  source 1..25: mol_type = unassigned RNA
gctgagtgaaagaggatatatttat

SEQ ID NO: 395 - RNA, 25 nt, Homo sapiens
  source 1..25: mol_type = unassigned RNA
ggatatatttattggctgagcaaga

SEQ ID NO: 396 - RNA, 25 nt, Homo sapiens
  source 1..25: mol_type = unassigned RNA
gatatatttattggctgagcaagaa

SEQ ID NO: 397 - RNA, 25 nt, Homo sapiens
  source 1..25: mol_type = unassigned RNA
tatttattggctgagcaagaaggga

SEQ ID NO: 398 - RNA, 25 nt, Homo sapiens
  source 1..25: mol_type = unassigned RNA
gctgagcaagaagggaaggtacagt

SEQ ID NO: 399 - RNA, 25 nt, Homo sapiens
  source 1..25: mol_type = unassigned RNA
caagaagggaaggtacagttggtaa

SEQ ID NO: 400 - RNA, 25 nt, Homo sapiens
  source 1..25: mol_type = unassigned RNA
gctgcttctagaagccaccagtctc

SEQ ID NO: 401 - RNA, 25 nt, Homo sapiens
  source 1..25: mol_type = unassigned RNA
cttgttccgagcccagtttcctcca

SEQ ID NO: 402 - RNA, 25 nt, Homo sapiens
  source 1..25: mol_type = unassigned RNA
gttccgagcccagtttcctccaagg

SEQ ID NO: 403 - RNA, 25 nt, Homo sapiens
  source 1..25: mol_type = unassigned RNA
gctgtactgagcatcatctcgatct

SEQ ID NO: 404 - RNA, 25 nt, Homo sapiens
  source 1..25: mol_type = unassigned RNA
gtactgagcatcatctcgatctcgg

SEQ ID NO: 405 - RNA, 25 nt, Homo sapiens
  source 1..25: mol_type = unassigned RNA
tactgagcatcatctcgatctcgga

SEQ ID NO: 406 - RNA, 25 nt, Homo sapiens
  source 1..25: mol_type = unassigned RNA
actgagcatcatctcgatctcggag

SEQ ID NO: 407 - RNA, 25 nt, Homo sapiens
  source 1..25: mol_type = unassigned RNA
atctcgatctcggaggggctaagag

SEQ ID NO: 408 - RNA, 25 nt, Homo sapiens
  source 1..25: mol_type = unassigned RNA
ggggctaagagaggagaagagaaaa

SEQ ID NO: 409 - RNA, 25 nt, Homo sapiens
  source 1..25: mol_type = unassigned RNA
actcagcaggtgcctgggcttctta

SEQ ID NO: 410 - RNA, 25 nt, Homo sapiens
  source 1..25: mol_type = unassigned RNA
atcctctttcactcagcaggtgcct

SEQ ID NO: 411 - RNA, 25 nt, Homo sapiens
  source 1..25: mol_type = unassigned RNA
tatcctctttcactcagcaggtgcc

SEQ ID NO: 412 - RNA, 25 nt, Homo sapiens
  source 1..25: mol_type = unassigned RNA
ataaatatatcctctttcactcagc

SEQ ID NO: 413 - RNA, 25 nt, Homo sapiens
  source 1..25: mol_type = unassigned RNA
tcggaacaagtgaacctgagactgg

SEQ ID NO: 414 - RNA, 25 nt, Homo sapiens
  source 1..25: mol_type = unassigned RNA
ggctcggaacaagtgaacctgagac

SEQ ID NO: 415 - RNA, 25 nt, Homo sapiens
  source 1..25: mol_type = unassigned RNA
cagccaccttggaggaaactgggct

SEQ ID NO: 416 - RNA, 25 nt, Homo sapiens
  source 1..25: mol_type = unassigned RNA
cagtacagccaccttggaggaaact

SEQ ID NO: 417 - RNA, 25 nt, Homo sapiens
  source 1..25: mol_type = unassigned RNA
tcagtacagccaccttggaggaaac

SEQ ID NO: 418 - RNA, 25 nt, Homo sapiens
  source 1..25: mol_type = unassigned RNA
atgatgctcagtacagccaccttgg

SEQ ID NO: 419 - RNA, 25 nt, Homo sapiens
  source 1..25: mol_type = unassigned RNA
gagatgatgctcagtacagccacct

SEQ ID NO: 420 - RNA, 25 nt, Homo sapiens
  source 1..25: mol_type = unassigned RNA
cccctcaacgctcacctgatagacc

SEQ ID NO: 421 - RNA, 25 nt, Homo sapiens
  source 1..25: mol_type = unassigned RNA
tcattcctcaacagagcttgtgtgt

SEQ ID NO: 422 - RNA, 25 nt, Homo sapiens
  source 1..25: mol_type = unassigned RNA
tatcaggtgagcgttgaggggaagg

SEQ ID NO: 423 - RNA, 25 nt, Homo sapiens
  source 1..25: mol_type = unassigned RNA
gtctatcaggtgagcgttgagggga

SEQ ID NO: 424 - RNA, 25 nt, Homo sapiens
  source 1..25: mol_type = unassigned RNA
ccaggtctatcaggtgagcgttgag

SEQ ID NO: 425 - RNA, 25 nt, Homo sapiens
  source 1..25: mol_type = unassigned RNA
accaggtctatcaggtgagcgttga

SEQ ID NO: 426 - RNA, 25 nt, Homo sapiens
  source 1..25: mol_type = unassigned RNA
gaccaggtctatcaggtgagcgttg

SEQ ID NO: 427 - RNA, 25 nt, Homo sapiens
  source 1..25: mol_type = unassigned RNA
ctgttgaggaatgaccaggtctatc

SEQ ID NO: 428 - RNA, 25 nt, Homo sapiens
  source 1..25: mol_type = unassigned RNA
acacaagctctgttgaggaatgacc

SEQ ID NO: 429 - RNA, 25 nt, Homo sapiens
  source 1..25: mol_type = unassigned RNA
agctgccgacacacaagctctgttg

SEQ ID NO: 430 - RNA, 25 nt, Homo sapiens
  source 1..25: mol_type = unassigned RNA
agcaaagcagaagactcccaaagca

SEQ ID NO: 431 - RNA, 25 nt, Homo sapiens
  source 1..25: mol_type = unassigned RNA
aagactcccaaagcaaggagcagag

SEQ ID NO: 432 - RNA, 25 nt, Homo sapiens
  source 1..25: mol_type = unassigned RNA
acatcagtgacaatgatgccagcca

SEQ ID NO: 433 - RNA, 25 nt, Homo sapiens
  source 1..25: mol_type = unassigned RNA
tcagtgacaatgatgccagccacgg

SEQ ID NO: 434 - RNA, 25 nt, Homo sapiens
  source 1..25: mol_type = unassigned RNA
tgacaatgatgccagccacggtggc

SEQ ID NO: 435 - RNA, 25 nt, Homo sapiens
  source 1..25: mol_type = unassigned RNA
ggctggatccagctccacacagctc

SEQ ID NO: 436 - RNA, 25 nt, Homo sapiens
  source 1..25: mol_type = unassigned RNA
agctccacacagctctggcacactg

SEQ ID NO: 437 - RNA, 25 nt, Homo sapiens
  source 1..25: mol_type = unassigned RNA
gctccacacagctctggcacactgt

SEQ ID NO: 438 - RNA, 25 nt, Homo sapiens
  source 1..25: mol_type = unassigned RNA
ctccacacagctctggcacactgtg

SEQ ID NO: 439 - RNA, 25 nt, Homo sapiens
  source 1..25: mol_type = unassigned RNA
tccacacagctctggcacactgtgg

SEQ ID NO: 440 - RNA, 25 nt, Homo sapiens
  source 1..25: mol_type = unassigned RNA
cacagctctggcacactgtggggga

SEQ ID NO: 441 - RNA, 25 nt, Homo sapiens
  source 1..25: mol_type = unassigned RNA
acagctctggcacactgtgggggaa

SEQ ID NO: 442 - RNA, 25 nt, Homo sapiens
  source 1..25: mol_type = unassigned RNA
gctctggcacactgtgggggaaggg

SEQ ID NO: 443 - RNA, 25 nt, Homo sapiens
  source 1..25: mol_type = unassigned RNA
cacactgtgggggaagggaggagag

SEQ ID NO: 444 - RNA, 25 nt, Homo sapiens
  source 1..25: mol_type = unassigned RNA
gactggaaggctgtctgggggttag

SEQ ID NO: 445 - RNA, 25 nt, Homo sapiens
  source 1..25: mol_type = unassigned RNA
gacatgagactggaaggctgtctgg

SEQ ID NO: 446 - RNA, 25 nt, Homo sapiens
  source 1..25: mol_type = unassigned RNA
ggacatgagactggaaggctgtctg

SEQ ID NO: 447 - RNA, 25 nt, Homo sapiens
  source 1..25: mol_type = unassigned RNA
tggacatgagactggaaggctgtct

SEQ ID NO: 448 - RNA, 25 nt, Homo sapiens
  source 1..25: mol_type = unassigned RNA
ctggacatgagactggaaggctgtc

SEQ ID NO: 449 - RNA, 25 nt, Homo sapiens
  source 1..25: mol_type = unassigned RNA
ctgctttgctggacatgagactgga

SEQ ID NO: 450 - RNA, 25 nt, Homo sapiens
  source 1..25: mol_type = unassigned RNA
tcttctgctttgctggacatgagac

SEQ ID NO: 451 - RNA, 25 nt, Homo sapiens
  source 1..25: mol_type = unassigned RNA
ttgctttgggagtcttctgctttgc

SEQ ID NO: 452 - RNA, 25 nt, Homo sapiens
  source 1..25: mol_type = unassigned RNA
tcattgccactctgctccttgcttt

SEQ ID NO: 453 - RNA, 25 nt, Homo sapiens
  source 1..25: mol_type = unassigned RNA
gtcattgccactctgctccttgctt

SEQ ID NO: 454 - RNA, 25 nt, Homo sapiens
  source 1..25: mol_type = unassigned RNA
tggagctggatccagccaccgtggc

SEQ ID NO: 455 - RNA, 25 nt, Homo sapiens
  source 1..25: mol_type = unassigned RNA
tgtgtggagctggatccagccaccg

SEQ ID NO: 456 - RNA, 25 nt, Homo sapiens
  source 1..25: mol_type = unassigned RNA
acagtgtgccagagctgtgtggagc

SEQ ID NO: 457 - RNA, 25 nt, Homo sapiens
  source 1..25: mol_type = unassigned RNA
tcccccacagtgtgccagagctgtg

SEQ ID NO: 458 - RNA, 25 nt, Homo sapiens
  source 1..25: mol_type = unassigned RNA
cacgtacttcgataatgaacttgca

SEQ ID NO: 459 - RNA, 25 nt, Homo sapiens
  source 1..25: mol_type = unassigned RNA
tcccattacacctatatattcctcg

SEQ ID NO: 460 - RNA, 25 nt, Homo sapiens
  source 1..25: mol_type = unassigned RNA
cccattacacctatatattcctcgt

SEQ ID NO: 461 - RNA, 25 nt, Homo sapiens
  source 1..25: mol_type = unassigned RNA
acacctatatattcctcgtgggtcc

SEQ ID NO: 462 - RNA, 25 nt, Homo sapiens
  source 1..25: mol_type = unassigned RNA
tcgtgggtccaggatgcgttttccc

SEQ ID NO: 463 - RNA, 25 nt, Homo sapiens
  source 1..25: mol_type = unassigned RNA
accgttccctctacccatgtgatgc

SEQ ID NO: 464 - RNA, 25 nt, Homo sapiens
  source 1..25: mol_type = unassigned RNA
acactctgtcctcaagttcctctat

SEQ ID NO: 465 - RNA, 25 nt, Homo sapiens
  source 1..25: mol_type = unassigned RNA
tcaagttcctctataggtatcttga

SEQ ID NO: 466 - RNA, 25 nt, Homo sapiens
  source 1..25: mol_type = unassigned RNA
caagttcctctataggtatcttgaa

SEQ ID NO: 467 - RNA, 25 nt, Homo sapiens
  source 1..25: mol_type = unassigned RNA
aagttcctctataggtatcttgaag

SEQ ID NO: 468 - RNA, 25 nt, Homo sapiens
  source 1..25: mol_type = unassigned RNA
taggtatcttgaaggggctcactaa

SEQ ID NO: 469 - RNA, 25 nt, Homo sapiens
  source 1..25: mol_type = unassigned RNA
aggtatcttgaaggggctcactaaa

SEQ ID NO: 470 - RNA, 25 nt, Homo sapiens
  source 1..25: mol_type = unassigned RNA
ggtatcttgaaggggctcactaaag

SEQ ID NO: 471 - RNA, 25 nt, Homo sapiens
  source 1..25: mol_type = unassigned RNA
gaagtacgtgcttcctgaacccttt

SEQ ID NO: 472 - RNA, 25 nt, Homo sapiens
  source 1..25: mol_type = unassigned RNA
cgaagtacgtgcttcctgaaccctt

SEQ ID NO: 473 - RNA, 25 nt, Homo sapiens
  source 1..25: mol_type = unassigned RNA
aggtgtaatgggacagatatataca

SEQ ID NO: 474 - RNA, 25 nt, Homo sapiens
  source 1..25: mol_type = unassigned RNA
cccacgaggaatatataggtgtaat

SEQ ID NO: 475 - RNA, 25 nt, Homo sapiens
  source 1..25: mol_type = unassigned RNA
acccacgaggaatatataggtgtaa

SEQ ID NO: 476 - RNA, 25 nt, Homo sapiens
  source 1..25: mol_type = unassigned RNA
catcctggacccacgaggaatatat

SEQ ID NO: 477 - RNA, 25 nt, Homo sapiens
  source 1..25: mol_type = unassigned RNA
tgggaaaacgcatcctggacccacg

SEQ ID NO: 478 - RNA, 25 nt, Homo sapiens
  source 1..25: mol_type = unassigned RNA
agactggacctgggaaaacgcatcc

SEQ ID NO: 479 - RNA, 25 nt, Homo sapiens
  source 1..25: mol_type = unassigned RNA
tctcagacattacaagactggacct

SEQ ID NO: 480 - RNA, 25 nt, Homo sapiens
  source 1..25: mol_type = unassigned RNA
ctctcagacattacaagactggacc

SEQ ID NO: 481 - RNA, 25 nt, Homo sapiens
  source 1..25: mol_type = unassigned RNA
acactgctctcagacattacaagac

SEQ ID NO: 482 - RNA, 25 nt, Homo sapiens
  source 1..25: mol_type = unassigned RNA
gcatcacatgggtagagggaacggt

SEQ ID NO: 483 - RNA, 25 nt, Homo sapiens
  source 1..25: mol_type = unassigned RNA
agcatcacatgggtagagggaacgg

SEQ ID NO: 484 - RNA, 25 nt, Homo sapiens
  source 1..25: mol_type = unassigned RNA
accagcatcacatgggtagagggaa

SEQ ID NO: 485 - RNA, 25 nt, Homo sapiens
  source 1..25: mol_type = unassigned RNA
gcaataccagcatcacatgggtaga

SEQ ID NO: 486 - RNA, 25 nt, Homo sapiens
  source 1..25: mol_type = unassigned RNA
tgcaataccagcatcacatgggtag

SEQ ID NO: 487 - RNA, 25 nt, Homo sapiens
  source 1..25: mol_type = unassigned RNA
gtgaattgcaataccagcatcacat

SEQ ID NO: 488 - RNA, 25 nt, Homo sapiens
  source 1..25: mol_type = unassigned RNA
tgtgaattgcaataccagcatcaca

SEQ ID NO: 489 - RNA, 25 nt, Homo sapiens
  source 1..25: mol_type = unassigned RNA
ttcaagatacctatagaggaacttg

SEQ ID NO: 490 - RNA, 25 nt, Homo sapiens
  source 1..25: mol_type = unassigned RNA
gtgagccccttcaagatacctatag

SEQ ID NO: 491 - RNA, 25 nt, Homo sapiens
  source 1..25: mol_type = unassigned RNA
tggagtagccttaccttgcgagaga

SEQ ID NO: 492 - RNA, 25 nt, Homo sapiens
  source 1..25: mol_type = unassigned RNA
ggagtagccttaccttgcgagagaa

SEQ ID NO: 493 - RNA, 25 nt, Homo sapiens
  source 1..25: mol_type = unassigned RNA
ttgcgagagaagggtagccagtacc

SEQ ID NO: 494 - RNA, 25 nt, Homo sapiens
  source 1..25: mol_type = unassigned RNA
aaacgtgctatgttccatctcccag

SEQ ID NO: 495 - RNA, 25 nt, Homo sapiens
  source 1..25: mol_type = unassigned RNA
cggaactcatccagtagataaagcc

SEQ ID NO: 496 - RNA, 25 nt, Homo sapiens
  source 1..25: mol_type = unassigned RNA
aagccaggtcaccgaactatcagcc

SEQ ID NO: 497 - RNA, 25 nt, Homo sapiens
  source 1..25: mol_type = unassigned RNA
agccaggtcaccgaactatcagcct

SEQ ID NO: 498 - RNA, 25 nt, Homo sapiens
  source 1..25: mol_type = unassigned RNA
agctgccctcccctagctgactcac

SEQ ID NO: 499 - RNA, 25 nt, Homo sapiens
  source 1..25: mol_type = unassigned RNA
cctcccctagctgactcacaggtac

SEQ ID NO: 500 - RNA, 25 nt, Homo sapiens
  source 1..25: mol_type = unassigned RNA
tagctgactcacaggtaccggaaag

SEQ ID NO: 501 - RNA, 25 nt, Homo sapiens
  source 1..25: mol_type = unassigned RNA
ctcacaggtaccggaaagaggagag

SEQ ID NO: 502 - RNA, 25 nt, Homo sapiens
  source 1..25: mol_type = unassigned RNA
tcacaggtaccggaaagaggagagt

SEQ ID NO: 503 - RNA, 25 nt, Homo sapiens
  source 1..25: mol_type = unassigned RNA
cacaggtaccggaaagaggagagtg

SEQ ID NO: 504 - RNA, 25 nt, Homo sapiens
  source 1..25: mol_type = unassigned RNA
acaggtaccggaaagaggagagtgg

SEQ ID NO: 505 - RNA, 25 nt, Homo sapiens
  source 1..25: mol_type = unassigned RNA
ggtaccggaaagaggagagtggggg

SEQ ID NO: 506 - RNA, 25 nt, Homo sapiens
  source 1..25: mol_type = unassigned RNA
ctgcttctctgctttctgccgttga

SEQ ID NO: 507 - RNA, 25 nt, Homo sapiens
  source 1..25: mol_type = unassigned RNA
cttctctgctttctgccgttgatgg

SEQ ID NO: 508 - RNA, 25 nt, Homo sapiens
  source 1..25: mol_type = unassigned RNA
ttctctgctttctgccgttgatggt

SEQ ID NO: 509 - RNA, 25 nt, Homo sapiens
  source 1..25: mol_type = unassigned RNA
aaggtaaggctactccaggtgggtg

SEQ ID NO: 510 - RNA, 25 nt, Homo sapiens
  source 1..25: mol_type = unassigned RNA
caaggtaaggctactccaggtgggt

SEQ ID NO: 511 - RNA, 25 nt, Homo sapiens
  source 1..25: mol_type = unassigned RNA
gcaaggtaaggctactccaggtggg

SEQ ID NO: 512 - RNA, 25 nt, Homo sapiens
  source 1..25: mol_type = unassigned RNA
ctcgcaaggtaaggctactccaggt

SEQ ID NO: 513 - RNA, 25 nt, Homo sapiens
  source 1..25: mol_type = unassigned RNA
tctcgcaaggtaaggctactccagg

SEQ ID NO: 514 - RNA, 25 nt, Homo sapiens
  source 1..25: mol_type = unassigned RNA
ttctctcgcaaggtaaggctactcc

SEQ ID NO: 515 - RNA, 25 nt, Homo sapiens
  source 1..25: mol_type = unassigned RNA
ctggctacccttctctcgcaaggta

SEQ ID NO: 516 - RNA, 25 nt, Homo sapiens
  source 1..25: mol_type = unassigned RNA
tggtactggctacccttctctcgca

SEQ ID NO: 517 - RNA, 25 nt, Homo sapiens
  source 1..25: mol_type = unassigned RNA
agcacgtttctctctggcctggtac

SEQ ID NO: 518 - RNA, 25 nt, Homo sapiens
  source 1..25: mol_type = unassigned RNA
gaacatagcacgtttctctctggcc

SEQ ID NO: 519 - RNA, 25 nt, Homo sapiens
  source 1..25: mol_type = unassigned RNA
agatggaacatagcacgtttctctc

SEQ ID NO: 520 - RNA, 25 nt, Homo sapiens
  source 1..25: mol_type = unassigned RNA
ctactggatgagttccgctgggaga

SEQ ID NO: 521 - RNA, 25 nt, Homo sapiens
  source 1..25: mol_type = unassigned RNA
ctttatctactggatgagttccgct

SEQ ID NO: 522 - RNA, 25 nt, Homo sapiens
  source 1..25: mol_type = unassigned RNA
gctttatctactggatgagttccgc

SEQ ID NO: 523 - RNA, 25 nt, Homo sapiens
  source 1..25: mol_type = unassigned RNA
agttcggtgacctggctttatctac

SEQ ID NO: 524 - RNA, 25 nt, Homo sapiens
  source 1..25: mol_type = unassigned RNA
cacccaggctgatagttcggtgacc

SEQ ID NO: 525 - RNA, 25 nt, Homo sapiens
  source 1..25: mol_type = unassigned RNA
gcagctctcacccaggctgatagtt

SEQ ID NO: 526 - RNA, 25 nt, Homo sapiens
  source 1..25: mol_type = unassigned RNA
agctaggggagggcagctctcaccc

SEQ ID NO: 527 - RNA, 25 nt, Homo sapiens
  source 1..25: mol_type = unassigned RNA
cggtacctgtgagtcagctagggga

SEQ ID NO: 528 - RNA, 25 nt, Homo sapiens
  source 1..25: mol_type = unassigned RNA
ccggtacctgtgagtcagctagggg

SEQ ID NO: 529 - RNA, 25 nt, Homo sapiens
  source 1..25: mol_type = unassigned RNA
tttccggtacctgtgagtcagctag

SEQ ID NO: 530 - RNA, 25 nt, Homo sapiens
  source 1..25: mol_type = unassigned RNA
ctttccggtacctgtgagtcagcta

SEQ ID NO: 531 - RNA, 25 nt, Homo sapiens
  source 1..25: mol_type = unassigned RNA
tctttccggtacctgtgagtcagct

SEQ ID NO: 532 - RNA, 25 nt, Homo sapiens
  source 1..25: mol_type = unassigned RNA
agttcctcccccactctcctctttc

SEQ ID NO: 533 - RNA, 25 nt, Homo sapiens
  source 1..25: mol_type = unassigned RNA
caggtattgtcagagtcctcttgtt

SEQ ID NO: 534 - RNA, 25 nt, Homo sapiens
  source 1..25: mol_type = unassigned RNA
tcagagtcctcttgtttggccttct

SEQ ID NO: 535 - RNA, 25 nt, Homo sapiens
  source 1..25: mol_type = unassigned RNA
agtcctcttgtttggccttctagga

SEQ ID NO: 536 - RNA, 25 nt, Homo sapiens
  source 1..25: mol_type = unassigned RNA
cttgtttggccttctaggaaggctg

SEQ ID NO: 537 - RNA, 25 nt, Homo sapiens
  source 1..25: mol_type = unassigned RNA
ttgtttggccttctaggaaggctgt

SEQ ID NO: 538 - RNA, 25 nt, Homo sapiens
  source 1..25: mol_type = unassigned RNA
ggacccagctttcttcaaccagtcc

SEQ ID NO: 539 - RNA, 25 nt, Homo sapiens
  source 1..25: mol_type = unassigned RNA
cccagctttcttcaaccagtccagg

SEQ ID NO: 540 - RNA, 25 nt, Homo sapiens
  source 1..25: mol_type = unassigned RNA
agctttcttcaaccagtccaggtgg

SEQ ID NO: 541 - RNA, 25 nt, Homo sapiens
  source 1..25: mol_type = unassigned RNA
cctctgccttgaacgtttccaagtg

SEQ ID NO: 542 - RNA, 25 nt, Homo sapiens
  source 1..25: mol_type = unassigned RNA
cgtttccaagtgaggtaaaacccgc

SEQ ID NO: 543 - RNA, 25 nt, Homo sapiens
  source 1..25: mol_type = unassigned RNA
agtgaggtaaaacccgcaggcccag

SEQ ID NO: 544 - RNA, 25 nt, Homo sapiens
  source 1..25: mol_type = unassigned RNA
cccagaggcctctctacttcctgtg

SEQ ID NO: 545 - RNA, 25 nt, Homo sapiens
  source 1..25: mol_type = unassigned RNA
ccagaggcctctctacttcctgtgt

SEQ ID NO: 546 - RNA, 25 nt, Homo sapiens
  source 1..25: mol_type = unassigned RNA
cagaggcctctctacttcctgtgtg

SEQ ID NO: 547 - RNA, 25 nt, Homo sapiens
  source 1..25: mol_type = unassigned RNA
gaaaccctcctcccctcccagcctc

SEQ ID NO: 548 - RNA, 25 nt, Homo sapiens
  source 1..25: mol_type = unassigned RNA
agcctcaggtgcctgcttcagaaaa

SEQ ID NO: 549 - RNA, 25 nt, Homo sapiens
  source 1..25: mol_type = unassigned RNA
aagaggactctgacaatacctggag

SEQ ID NO: 550 - RNA, 25 nt, Homo sapiens
  source 1..25: mol_type = unassigned RNA
caagaggactctgacaatacctgga

SEQ ID NO: 551 - RNA, 25 nt, Homo sapiens
  source 1..25: mol_type = unassigned RNA
acaagaggactctgacaatacctgg

SEQ ID NO: 552 - RNA, 25 nt, Homo sapiens
  source 1..25: mol_type = unassigned RNA
caaacaagaggactctgacaatacc

SEQ ID NO: 553 - RNA, 25 nt, Homo sapiens
  source 1..25: mol_type = unassigned RNA
cagccttcctagaaggccaaacaag

SEQ ID NO: 554 - RNA, 25 nt, Homo sapiens
  source 1..25: mol_type = unassigned RNA
agctgggtcccacagccttcctaga

SEQ ID NO: 555 - RNA, 25 nt, Homo sapiens
  source 1..25: mol_type = unassigned RNA
ccacctggactggttgaagaaagct

SEQ ID NO: 556 - RNA, 25 nt, Homo sapiens
  source 1..25: mol_type = unassigned RNA
tccacctggactggttgaagaaagc

SEQ ID NO: 557 - RNA, 25 nt, Homo sapiens
  source 1..25: mol_type = unassigned RNA
tcaaggcagaggcctccacctggac

SEQ ID NO: 558 - RNA, 25 nt, Homo sapiens
  source 1..25: mol_type = unassigned RNA
aacgttcaaggcagaggcctccacc

SEQ ID NO: 559 - RNA, 25 nt, Homo sapiens
  source 1..25: mol_type = unassigned RNA
cctcacttggaaacgttcaaggcag

SEQ ID NO: 560 - RNA, 25 nt, Homo sapiens
  source 1..25: mol_type = unassigned RNA
gttttacctcacttggaaacgttca

SEQ ID NO: 561 - RNA, 25 nt, Homo sapiens
  source 1..25: mol_type = unassigned RNA
ctgggcctgcgggttttacctcact

SEQ ID NO: 562 - RNA, 25 nt, Homo sapiens
  source 1..25: mol_type = unassigned RNA
gaagtagagaggcctctgggcctgc

SEQ ID NO: 563 - RNA, 25 nt, Homo sapiens
  source 1..25: mol_type = unassigned RNA
ggaagtagagaggcctctgggcctg

SEQ ID NO: 564 - RNA, 25 nt, Homo sapiens
  source 1..25: mol_type = unassigned RNA
ccacacaggaagtagagaggcctct

SEQ ID NO: 565 - RNA, 25 nt, Homo sapiens
  source 1..25: mol_type = unassigned RNA
cccacacaggaagtagagaggcctc

SEQ ID NO: 566 - RNA, 25 nt, Homo sapiens
  source 1..25: mol_type = unassigned RNA
tctgaaccccacacaggaagtagag

SEQ ID NO: 567 - RNA, 25 nt, Homo sapiens
  source 1..25: mol_type = unassigned RNA
ggaggagggtttctgaaccccacac

SEQ ID NO: 568 - RNA, 25 nt, Homo sapiens
  source 1..25: mol_type = unassigned RNA
ggcacctgaggctgggaggggagga

SEQ ID NO: 569 - RNA, 25 nt, Homo sapiens
  source 1..25: mol_type = unassigned RNA
aggcacctgaggctgggaggggagg

SEQ ID NO: 570 - RNA, 25 nt, Homo sapiens
  source 1..25: mol_type = unassigned RNA
agcaggcacctgaggctgggagggg

SEQ ID NO: 571 - RNA, 25 nt, Homo sapiens
  source 1..25: mol_type = unassigned RNA
tgaagcaggcacctgaggctgggag

SEQ ID NO: 572 - RNA, 25 nt, Homo sapiens
  source 1..25: mol_type = unassigned RNA
ctgaagcaggcacctgaggctggga

SEQ ID NO: 573 - RNA, 25 nt, Homo sapiens
  source 1..25: mol_type = unassigned RNA
tctgaagcaggcacctgaggctggg

SEQ ID NO: 574 - RNA, 25 nt, Homo sapiens
  source 1..25: mol_type = unassigned RNA
ttttctgaagcaggcacctgaggct

SEQ ID NO: 575 - RNA, 25 nt, Homo sapiens
  source 1..25: mol_type = unassigned RNA
attttctgaagcaggcacctgaggc

SEQ ID NO: 576 - RNA, 25 nt, Homo sapiens
  source 1..25: mol_type = unassigned RNA
caccattttctgaagcaggcacctg

SEQ ID NO: 577 - RNA, 25 nt, Homo sapiens
  source 1..25: mol_type = unassigned RNA
agagagactcaccattttctgaagc

SEQ ID NO: 578 - RNA, 25 nt, Homo sapiens
  source 1..25: mol_type = unassigned RNA
ttttttccagaagtagtaagtctgc

SEQ ID NO: 579 - RNA, 25 nt, Homo sapiens
  source 1..25: mol_type = unassigned RNA
cagtcccatgaaacaaagatgcagt

SEQ ID NO: 580 - RNA, 25 nt, Homo sapiens
  source 1..25: mol_type = unassigned RNA
agtcccatgaaacaaagatgcagtc

SEQ ID NO: 581 - RNA, 25 nt, Homo sapiens
  source 1..25: mol_type = unassigned RNA
aacaaagatgcagtcgggcactcac

SEQ ID NO: 582 - RNA, 25 nt, Homo sapiens
  source 1..25: mol_type = unassigned RNA
cagtcgggcactcactggagagttc

SEQ ID NO: 583 - RNA, 25 nt, Homo sapiens
  source 1..25: mol_type = unassigned RNA
agtcgggcactcactggagagttct

SEQ ID NO: 584 - RNA, 25 nt, Homo sapiens
  source 1..25: mol_type = unassigned RNA
gagttctgggcctctgcctcttatc

SEQ ID NO: 585 - RNA, 25 nt, Homo sapiens
  source 1..25: mol_type = unassigned RNA
ggcctctgcctcttatcaggtgagt

SEQ ID NO: 586 - RNA, 25 nt, Homo sapiens
  source 1..25: mol_type = unassigned RNA
tctgcctcttatcaggtgagtagga

SEQ ID NO: 587 - RNA, 25 nt, Homo sapiens
  source 1..25: mol_type = unassigned RNA
ctcttatcaggtgagtaggatggag

SEQ ID NO: 588 - RNA, 25 nt, Homo sapiens
  source 1..25: mol_type = unassigned RNA
atcaggtgagtaggatggagtggaa

SEQ ID NO: 589 - RNA, 25 nt, Homo sapiens
  source 1..25: mol_type = unassigned RNA
tcaggtgagtaggatggagtggaaa

SEQ ID NO: 590 - RNA, 25 nt, Homo sapiens
  source 1..25: mol_type = unassigned RNA
cggaggccagcagacttactacttc

SEQ ID NO: 591 - RNA, 25 nt, Homo sapiens
  source 1..25: mol_type = unassigned RNA
gactgttactttactaagatggcgg

SEQ ID NO: 592 - RNA, 25 nt, Homo sapiens
  source 1..25: mol_type = unassigned RNA
tgggactgttactttactaagatgg

SEQ ID NO: 593 - RNA, 25 nt, Homo sapiens
  source 1..25: mol_type = unassigned RNA
tcatgggactgttactttactaaga

SEQ ID NO: 594 - RNA, 25 nt, Homo sapiens
  source 1..25: mol_type = unassigned RNA
gtgcccgactgcatctttgtttcat

SEQ ID NO: 595 - RNA, 25 nt, Homo sapiens
  source 1..25: mol_type = unassigned RNA
agtgcccgactgcatctttgtttca

SEQ ID NO: 596 - RNA, 25 nt, Homo sapiens
  source 1..25: mol_type = unassigned RNA
atcctactcacctgataagaggcag

SEQ ID NO: 597 - RNA, 25 nt, Homo sapiens
  source 1..25: mol_type = unassigned RNA
cactccatcctactcacctgataag

SEQ ID NO: 598 - RNA, 25 nt, Homo sapiens
  source 1..25: mol_type = unassigned RNA
ttttttttcttatttattttctagt

SEQ ID NO: 599 - RNA, 25 nt, Homo sapiens
  source 1..25: mol_type = unassigned RNA
tcttatttattttctagttggcgtt

SEQ ID NO: 600 - RNA, 25 nt, Homo sapiens
  source 1..25: mol_type = unassigned RNA
cttatttattttctagttggcgttt

SEQ ID NO: 601 - RNA, 25 nt, Homo sapiens
  source 1..25: mol_type = unassigned RNA
ttatttattttctagttggcgtttg

SEQ ID NO: 602 - RNA, 25 nt, Homo sapiens
  source 1..25: mol_type = unassigned RNA
tatttattttctagttggcgtttgg

SEQ ID NO: 603 - RNA, 25 nt, Homo sapiens
  source 1..25: mol_type = unassigned RNA
ttctagttggcgtttgggggcaaga

SEQ ID NO: 604 - RNA, 25 nt, Homo sapiens
  source 1..25: mol_type = unassigned RNA
gtttccttttcaggtaatgaagaaa

SEQ ID NO: 605 - RNA, 25 nt, Homo sapiens
  source 1..25: mol_type = unassigned RNA
tttccttttcaggtaatgaagaaat

SEQ ID NO: 606 - RNA, 25 nt, Homo sapiens
  source 1..25: mol_type = unassigned RNA
ttacccatttcttcattacctgaaa

SEQ ID NO: 607 - RNA, 25 nt, Homo sapiens
  source 1..25: mol_type = unassigned RNA
gctgtttccttttttcattttcagg

SEQ ID NO: 608 - RNA, 25 nt, Homo sapiens
  source 1..25: mol_type = unassigned RNA
gtattacacagacacgtgagtttat

SEQ ID NO: 609 - RNA, 25 nt, Homo sapiens
  source 1..25: mol_type = unassigned RNA
tgtaataccacctgaaaatgaaaaa

SEQ ID NO: 610 - RNA, 25 nt, Homo sapiens
  source 1..25: mol_type = unassigned RNA
ccccagcatataaagtctccatctc

SEQ ID NO: 611 - RNA, 25 nt, Homo sapiens
  source 1..25: mol_type = unassigned RNA
taatattgacatgccctcagtatcc

SEQ ID NO: 612 - RNA, 25 nt, Homo sapiens
  source 1..25: mol_type = unassigned RNA
tcagtatcctggatctgaaatacta

SEQ ID NO: 613 - RNA, 25 nt, Homo sapiens
  source 1..25: mol_type = unassigned RNA
tatggcaacacaatgataaaaacat

SEQ ID NO: 614 - RNA, 25 nt, Homo sapiens
  source 1..25: mol_type = unassigned RNA
ggcaacacaatgataaaaacatagg

SEQ ID NO: 615 - RNA, 25 nt, Homo sapiens
  source 1..25: mol_type = unassigned RNA
aatgataaaaacataggcggtgatg

SEQ ID NO: 616 - RNA, 25 nt, Homo sapiens
  source 1..25: mol_type = unassigned RNA
gcggtgatgaggatgataaaaacat

SEQ ID NO: 617 - RNA, 25 nt, Homo sapiens
  source 1..25: mol_type = unassigned RNA
gatgataaaaacataggcagtgatg

SEQ ID NO: 618 - RNA, 25 nt, Homo sapiens
  source 1..25: mol_type = unassigned RNA
agtgatgaggatcacctgtcactga

SEQ ID NO: 619 - RNA, 25 nt, Homo sapiens
  source 1..25: mol_type = unassigned RNA
ctgtcactgaaggaattttcagaat

SEQ ID NO: 620 - RNA, 25 nt, Homo sapiens
  source 1..25: mol_type = unassigned RNA
aggaattttcagaattggagcaaag

SEQ ID NO: 621 - RNA, 25 nt, Homo sapiens
  source 1..25: mol_type = unassigned RNA
gtggttattatgtctgctaccccag

SEQ ID NO: 622 - RNA, 25 nt, Homo sapiens
  source 1..25: mol_type = unassigned RNA
agatgcgaacttttatctctacctg

SEQ ID NO: 623 - RNA, 25 nt, Homo sapiens
  source 1..25: mol_type = unassigned RNA
gatgcgaacttttatctctacctga

SEQ ID NO: 624 - RNA, 25 nt, Homo sapiens
  source 1..25: mol_type = unassigned RNA
acttttatctctacctgagggcaag

SEQ ID NO: 625 - RNA, 25 nt, Homo sapiens
  source 1..25: mol_type = unassigned RNA
tctacctgagggcaagaggtaatcc

SEQ ID NO: 626 - RNA, 25 nt, Homo sapiens
  source 1..25: mol_type = unassigned RNA
aagaggtaatccaggtctccagaac

SEQ ID NO: 627 - RNA, 25 nt, Homo sapiens
  source 1..25: mol_type = unassigned RNA
tatgctggggagaaagaagggaaat

SEQ ID NO: 628 - RNA, 25 nt, Homo sapiens
  source 1..25: mol_type = unassigned RNA
gactttatatgctggggagaaagaa

SEQ ID NO: 629 - RNA, 25 nt, Homo sapiens
  source 1..25: mol_type = unassigned RNA
agactttatatgctggggagaaaga

SEQ ID NO: 630 - RNA, 25 nt, Homo sapiens
  source 1..25: mol_type = unassigned RNA
ccagagatggagactttatatgctg

SEQ ID NO: 631 - RNA, 25 nt, Homo sapiens
  source 1..25: mol_type = unassigned RNA
tccagagatggagactttatatgct

SEQ ID NO: 632 - RNA, 25 nt, Homo sapiens
  source 1..25: mol_type = unassigned RNA
ttccagagatggagactttatatgc

SEQ ID NO: 633 - RNA, 25 nt, Homo sapiens
  source 1..25: mol_type = unassigned RNA
gtcaatattactgtggttccagaga

SEQ ID NO: 634 - RNA, 25 nt, Homo sapiens
  source 1..25: mol_type = unassigned RNA
tactgagggcatgtcaatattactg

SEQ ID NO: 635 - RNA, 25 nt, Homo sapiens
  source 1..25: mol_type = unassigned RNA
tagtatttcagatccaggatactga

SEQ ID NO: 636 - RNA, 25 nt, Homo sapiens
  source 1..25: mol_type = unassigned RNA
atagtatttcagatccaggatactg

SEQ ID NO: 637 - RNA, 25 nt, Homo sapiens
  source 1..25: mol_type = unassigned RNA
tgtgttgccatagtatttcagatcc

SEQ ID NO: 638 - RNA, 25 nt, Homo sapiens
  source 1..25: mol_type = unassigned RNA
caattctgaaaattccttcagtgac

SEQ ID NO: 639 - RNA, 25 nt, Homo sapiens
  source 1..25: mol_type = unassigned RNA
cgcatcttctggtttgcttcctctg

SEQ ID NO: 640 - RNA, 25 nt, Homo sapiens
  source 1..25: mol_type = unassigned RNA
tcgcatcttctggtttgcttcctct

SEQ ID NO: 641 - RNA, 25 nt, Homo sapiens
  source 1..25: mol_type = unassigned RNA
ttcgcatcttctggtttgcttcctc

SEQ ID NO: 642 - RNA, 25 nt, Homo sapiens
  source 1..25: mol_type = unassigned RNA
ggtagagataaaagttcgcatcttc

SEQ ID NO: 643 - RNA, 25 nt, Homo sapiens
  source 1..25: mol_type = unassigned RNA
gagacctggattacctcttgccctc

SEQ ID NO: 644 - RNA, 25 nt, Homo sapiens
  source 1..25: mol_type = unassigned RNA
ccccccacagtgtgtgagaactgca

SEQ ID NO: 645 - RNA, 25 nt, Homo sapiens
  source 1..25: mol_type = unassigned RNA
acagtgtgtgagaactgcatggaga

SEQ ID NO: 646 - RNA, 25 nt, Homo sapiens
  source 1..25: mol_type = unassigned RNA
aactgcatggagatggatgtgatgt

SEQ ID NO: 647 - RNA, 25 nt, Homo sapiens
  source 1..25: mol_type = unassigned RNA
tgcatggagatggatgtgatgtcgg

SEQ ID NO: 648 - RNA, 25 nt, Homo sapiens
  source 1..25: mol_type = unassigned RNA
atgtcggtggccacaattgtcatag

SEQ ID NO: 649 - RNA, 25 nt, Homo sapiens
  source 1..25: mol_type = unassigned RNA
ttgtcatagtggacatctgcatcac

SEQ ID NO: 650 - RNA, 25 nt, Homo sapiens
  source 1..25: mol_type = unassigned RNA
tgtcatagtggacatctgcatcact

SEQ ID NO: 651 - RNA, 25 nt, Homo sapiens
  source 1..25: mol_type = unassigned RNA
gtcatagtggacatctgcatcactg

SEQ ID NO: 652 - RNA, 25 nt, Homo sapiens
  source 1..25: mol_type = unassigned RNA
tcatagtggacatctgcatcactgg

SEQ ID NO: 653 - RNA, 25 nt, Homo sapiens
  source 1..25: mol_type = unassigned RNA
tgcatcactgggggcttgctgctgc

SEQ ID NO: 654 - RNA, 25 nt, Homo sapiens
  source 1..25: mol_type = unassigned RNA
gggcttgctgctgctggtttactac

SEQ ID NO: 655 - RNA, 25 nt, Homo sapiens
  source 1..25: mol_type = unassigned RNA
gtttactactggagcaagaatagaa

SEQ ID NO: 656 - RNA, 25 nt, Homo sapiens
  source 1..25: mol_type = unassigned RNA
tactggagcaagaatagaaaggcca

SEQ ID NO: 657 - RNA, 25 nt, Homo sapiens
  source 1..25: mol_type = unassigned RNA
aggccaaggccaagcctgtgacacg

SEQ ID NO: 658 - RNA, 25 nt, Homo sapiens
  source 1..25: mol_type = unassigned RNA
aaggccaagcctgtgacacgaggag

SEQ ID NO: 659 - RNA, 25 nt, Homo sapiens
  source 1..25: mol_type = unassigned RNA
aggccaagcctgtgacacgaggagc

SEQ ID NO: 660 - RNA, 25 nt, Homo sapiens
  source 1..25: mol_type = unassigned RNA
agcctgtgacacgaggagcgggtgc

SEQ ID NO: 661 - RNA, 25 nt, Homo sapiens
  source 1..25: mol_type = unassigned RNA
ctgtgacacgaggagcgggtgctgg

SEQ ID NO: 662 - RNA, 25 nt, Homo sapiens
  source 1..25: mol_type = unassigned RNA
gacacgaggagcgggtgctggcggc

SEQ ID NO: 663 - RNA, 25 nt, Homo sapiens
  source 1..25: mol_type = unassigned RNA
aggagcgggtgctggcggcaggcaa

SEQ ID NO: 664 - RNA, 25 nt, Homo sapiens
  source 1..25: mol_type = unassigned RNA
ggagcgggtgctggcggcaggcaaa

SEQ ID NO: 665 - RNA, 25 nt, Homo sapiens
  source 1..25: mol_type = unassigned RNA
gagcgggtgctggcggcaggcaaag

SEQ ID NO: 666 - RNA, 25 nt, Homo sapiens
  source 1..25: mol_type = unassigned RNA
ggtgctggcggcaggcaaaggggta

SEQ ID NO: 667 - RNA, 25 nt, Homo sapiens
  source 1..25: mol_type = unassigned RNA
ggcggcaggcaaaggggtaaggctg

SEQ ID NO: 668 - RNA, 25 nt, Homo sapiens
  source 1..25: mol_type = unassigned RNA
acactgtggggggtggggtggggag

SEQ ID NO: 669 - RNA, 25 nt, Homo sapiens
  source 1..25: mol_type = unassigned RNA
ctcacacactgtggggggtggggtg

SEQ ID NO: 670 - RNA, 25 nt, Homo sapiens
  source 1..25: mol_type = unassigned RNA
tctcacacactgtggggggtggggt

SEQ ID NO: 671 - RNA, 25 nt, Homo sapiens
  source 1..25: mol_type = unassigned RNA
ttctcacacactgtggggggtgggg

SEQ ID NO: 672 - RNA, 25 nt, Homo sapiens
  source 1..25: mol_type = unassigned RNA
cagttctcacacactgtggggggtg

SEQ ID NO: 673 - RNA, 25 nt, Homo sapiens
  source 1..25: mol_type = unassigned RNA
gcagttctcacacactgtggggggt

SEQ ID NO: 674 - RNA, 25 nt, Homo sapiens
  source 1..25: mol_type = unassigned RNA
tgcagttctcacacactgtgggggg

SEQ ID NO: 675 - RNA, 25 nt, Homo sapiens
  source 1..25: mol_type = unassigned RNA
ccatgcagttctcacacactgtggg

SEQ ID NO: 676 - RNA, 25 nt, Homo sapiens
  source 1..25: mol_type = unassigned RNA
tccatgcagttctcacacactgtgg

SEQ ID NO: 677 - RNA, 25 nt, Homo sapiens
  source 1..25: mol_type = unassigned RNA
ctccatgcagttctcacacactgtg

SEQ ID NO: 678 - RNA, 25 nt, Homo sapiens
  source 1..25: mol_type = unassigned RNA
tctccatgcagttctcacacactgt

SEQ ID NO: 679 - RNA, 25 nt, Homo sapiens
  source 1..25: mol_type = unassigned RNA
atctccatgcagttctcacacactg

SEQ ID NO: 680 - RNA, 25 nt, Homo sapiens
  source 1..25: mol_type = unassigned RNA
atgcagatgtccactatgacaattg

SEQ ID NO: 681 - RNA, 25 nt, Homo sapiens
  source 1..25: mol_type = unassigned RNA
gctcctcgtgtcacaggcttggcct

SEQ ID NO: 682 - RNA, 25 nt, Homo sapiens
  source 1..25: mol_type = unassigned RNA
gcacccgctcctcgtgtcacaggct

SEQ ID NO: 683 - RNA, 25 nt, Homo sapiens
  source 1..25: mol_type = unassigned RNA
cgccagcacccgctcctcgtgtcac

SEQ ID NO: 684 - RNA, 25 nt, Homo sapiens
  source 1..25: mol_type = unassigned RNA
cctccttcctccgcaggacaaaaca

SEQ ID NO: 685 - RNA, 25 nt, Homo sapiens
  source 1..25: mol_type = unassigned RNA
ttcctccgcaggacaaaacaaggag

SEQ ID NO: 686 - RNA, 25 nt, Homo sapiens
  source 1..25: mol_type = unassigned RNA
ccacctgttcccaacccagactatg

SEQ ID NO: 687 - RNA, 25 nt, Homo sapiens
  source 1..25: mol_type = unassigned RNA
tcccaacccagactatgaggtaacg

SEQ ID NO: 688 - RNA, 25 nt, Homo sapiens
  source 1..25: mol_type = unassigned RNA
cccaacccagactatgaggtaacgt

SEQ ID NO: 689 - RNA, 25 nt, Homo sapiens
  source 1..25: mol_type = unassigned RNA
actatgaggtaacgtgggatagaaa

SEQ ID NO: 690 - RNA, 25 nt, Homo sapiens
  source 1..25: mol_type = unassigned RNA
ctatgaggtaacgtgggatagaaat

SEQ ID NO: 691 - RNA, 25 nt, Homo sapiens
  source 1..25: mol_type = unassigned RNA
ttgttttgtcctgcggaggaaggag

SEQ ID NO: 692 - RNA, 25 nt, Homo sapiens
  source 1..25: mol_type = unassigned RNA
cttgttttgtcctgcggaggaagga

SEQ ID NO: 693 - RNA, 25 nt, Homo sapiens
  source 1..25: mol_type = unassigned RNA
ccttgttttgtcctgcggaggaagg

SEQ ID NO: 694 - RNA, 25 nt, Homo sapiens
  source 1..25: mol_type = unassigned RNA
tctccttgttttgtcctgcggagga

SEQ ID NO: 695 - RNA, 25 nt, Homo sapiens
  source 1..25: mol_type = unassigned RNA
ggcctctccttgttttgtcctgcgg

SEQ ID NO: 696 - RNA, 25 nt, Homo sapiens
  source 1..25: mol_type = unassigned RNA
ggtggcctctccttgttttgtcctg

SEQ ID NO: 697 - RNA, 25 nt, Homo sapiens
  source 1..25: mol_type = unassigned RNA
catagtctgggttgggaacaggtgg

SEQ ID NO: 698 - RNA, 25 nt, Homo sapiens
  source 1..25: mol_type = unassigned RNA
cctcatagtctgggttgggaacagg

SEQ ID NO: 699 - RNA, 25 nt, Homo sapiens
  source 1..25: mol_type = unassigned RNA
ttacctcatagtctgggttgggaac

SEQ ID NO: 700 - RNA, 25 nt, Homo sapiens
  source 1..25: mol_type = unassigned RNA
cccacgttacctcatagtctgggtt

SEQ ID NO: 701 - RNA, 25 nt, Homo sapiens
  source 1..25: mol_type = unassigned RNA
tcccacgttacctcatagtctgggt

SEQ ID NO: 702 - RNA, 25 nt, Homo sapiens
  source 1..25: mol_type = unassigned RNA
tctatcccacgttacctcatagtct

SEQ ID NO: 703 - RNA, 25 nt, Homo sapiens
  source 1..25: mol_type = unassigned RNA
ttctatcccacgttacctcatagtc

SEQ ID NO: 704 - RNA, 25 nt, Homo sapiens
  source 1..25: mol_type = unassigned RNA
ctctctatttcacccccagcccatc

SEQ ID NO: 705 - RNA, 25 nt, Homo sapiens
  source 1..25: mol_type = unassigned RNA
tatttcacccccagcccatccggaa

SEQ ID NO: 706 - RNA, 25 nt, Homo sapiens
  source 1..25: mol_type = unassigned RNA
cccccagcccatccggaaaggccag

SEQ ID NO: 707 - RNA, 25 nt, Homo sapiens
  source 1..25: mol_type = unassigned RNA
ccccagcccatccggaaaggccagc

SEQ ID NO: 708 - RNA, 25 nt, Homo sapiens
  source 1..25: mol_type = unassigned RNA
ggaaaggccagcgggacctgtattc

SEQ ID NO: 709 - RNA, 25 nt, Homo sapiens
  source 1..25: mol_type = unassigned RNA
tgaatcagagacgcatctgaccctc

SEQ ID NO: 710 - RNA, 25 nt, Homo sapiens
  source 1..25: mol_type = unassigned RNA
ccctctggagaacactgcctcccgc

SEQ ID NO: 711 - RNA, 25 nt, Homo sapiens
  source 1..25: mol_type = unassigned RNA
ggagaacactgcctcccgctggccc

SEQ ID NO: 712 - RNA, 25 nt, Homo sapiens
  source 1..25: mol_type = unassigned RNA
agtccccctgcgactccctgtttcc

SEQ ID NO: 713 - RNA, 25 nt, Homo sapiens
  source 1..25: mol_type = unassigned RNA
gtccccctgcgactccctgtttcct

SEQ ID NO: 714 - RNA, 25 nt, Homo sapiens
  source 1..25: mol_type = unassigned RNA
gactccctgtttcctgggctagtct

SEQ ID NO: 715 - RNA, 25 nt, Homo sapiens
  source 1..25: mol_type = unassigned RNA
gagagagaatcgttcctcagcctca

SEQ ID NO: 716 - RNA, 25 nt, Homo sapiens
  source 1..25: mol_type = unassigned RNA
gctccctcctccctgccttctctgc

SEQ ID NO: 717 - RNA, 25 nt, Homo sapiens
  source 1..25: mol_type = unassigned RNA
tcatcagtagtcacaccctcacagc

SEQ ID NO: 718 - RNA, 25 nt, Homo sapiens
  source 1..25: mol_type = unassigned RNA
ctcacagctggcctgccctcttgcc

SEQ ID NO: 719 - RNA, 25 nt, Homo sapiens
  source 1..25: mol_type = unassigned RNA
tttgtgctattcactcccttccctt

SEQ ID NO: 720 - RNA, 25 nt, Homo sapiens
  source 1..25: mol_type = unassigned RNA
cgccgtccccttttgcagccctctc

SEQ ID NO: 721 - RNA, 25 nt, Homo sapiens
  source 1..25: mol_type = unassigned RNA
gccgtccccttttgcagccctctct

SEQ ID NO: 722 - RNA, 25 nt, Homo sapiens
  source 1..25: mol_type = unassigned RNA
ccgtccccttttgcagccctctctg

SEQ ID NO: 723 - RNA, 25 nt, Homo sapiens
  source 1..25: mol_type = unassigned RNA
ccccttttgcagccctctctgggga

SEQ ID NO: 724 - RNA, 25 nt, Homo sapiens
  source 1..25: mol_type = unassigned RNA
tttgcagccctctctggggatggac

SEQ ID NO: 725 - RNA, 25 nt, Homo sapiens
  source 1..25: mol_type = unassigned RNA
ttgcagccctctctggggatggact

SEQ ID NO: 726 - RNA, 25 nt, Homo sapiens
  source 1..25: mol_type = unassigned RNA
ggatggactgggtaaatgttgacag

SEQ ID NO: 727 - RNA, 25 nt, Homo sapiens
  source 1..25: mol_type = unassigned RNA
gaggccctgccccgttcacagatcc

SEQ ID NO: 728 - RNA, 25 nt, Homo sapiens
  source 1..25: mol_type = unassigned RNA
actccctccaccccccctccactgt

SEQ ID NO: 729 - RNA, 25 nt, Homo sapiens
  source 1..25: mol_type = unassigned RNA
ccaccccccctccactgtaggccac

SEQ ID NO: 730 - RNA, 25 nt, Homo sapiens
  source 1..25: mol_type = unassigned RNA
cccccctccactgtaggccactgga

SEQ ID NO: 731 - RNA, 25 nt, Homo sapiens
  source 1..25: mol_type = unassigned RNA
gagagagaaaaaaataaactgtatt

SEQ ID NO: 732 - RNA, 25 nt, Homo sapiens
  source 1..25: mol_type = unassigned RNA
atgggctgggggtgaaatagagagg

SEQ ID NO: 733 - RNA, 25 nt, Homo sapiens
  source 1..25: mol_type = unassigned RNA
gatgggctgggggtgaaatagagag

SEQ ID NO: 734 - RNA, 25 nt, Homo sapiens
  source 1..25: mol_type = unassigned RNA
ggatgggctgggggtgaaatagaga

SEQ ID NO: 735 - RNA, 25 nt, Homo sapiens
  source 1..25: mol_type = unassigned RNA
cggatgggctgggggtgaaatagag

SEQ ID NO: 736 - RNA, 25 nt, Homo sapiens
  source 1..25: mol_type = unassigned RNA
ccgctggcctttccggatgggctgg

SEQ ID NO: 737 - RNA, 25 nt, Homo sapiens
  source 1..25: mol_type = unassigned RNA
cccgctggcctttccggatgggctg

SEQ ID NO: 738 - RNA, 25 nt, Homo sapiens
  source 1..25: mol_type = unassigned RNA
tcccgctggcctttccggatgggct

SEQ ID NO: 739 - RNA, 25 nt, Homo sapiens
  source 1..25: mol_type = unassigned RNA
gtcccgctggcctttccggatgggc

SEQ ID NO: 740 - RNA, 25 nt, Homo sapiens
  source 1..25: mol_type = unassigned RNA
acaggtcccgctggcctttccggat

SEQ ID NO: 741 - RNA, 25 nt, Homo sapiens
  source 1..25: mol_type = unassigned RNA
tacaggtcccgctggcctttccgga

SEQ ID NO: 742 - RNA, 25 nt, Homo sapiens
  source 1..25: mol_type = unassigned RNA
agaatacaggtcccgctggcctttc

SEQ ID NO: 743 - RNA, 25 nt, Homo sapiens
  source 1..25: mol_type = unassigned RNA
attcaggccagaatacaggtcccgc

SEQ ID NO: 744 - RNA, 25 nt, Homo sapiens
  source 1..25: mol_type = unassigned RNA
gcgtctctgattcaggccagaatac

SEQ ID NO: 745 - RNA, 25 nt, Homo sapiens
  source 1..25: mol_type = unassigned RNA
agagggtcagatgcgtctctgattc

SEQ ID NO: 746 - RNA, 25 nt, Homo sapiens
  source 1..25: mol_type = unassigned RNA
ccagcgggaggcagtgttctccaga

SEQ ID NO: 747 - RNA, 25 nt, Homo sapiens
  source 1..25: mol_type = unassigned RNA
gccagcgggaggcagtgttctccag

SEQ ID NO: 748 - RNA, 25 nt, Homo sapiens
  source 1..25: mol_type = unassigned RNA
tggagaggagacctgggccagcggg

SEQ ID NO: 749 - RNA, 25 nt, Homo sapiens
  source 1..25: mol_type = unassigned RNA
gactggagaggagacctgggccagc

SEQ ID NO: 750 - RNA, 25 nt, Homo sapiens
  source 1..25: mol_type = unassigned RNA
ggactggagaggagacctgggccag

SEQ ID NO: 751 - RNA, 25 nt, Homo sapiens
  source 1..25: mol_type = unassigned RNA
cgcagggggactggagaggagacct

SEQ ID NO: 752 - RNA, 25 nt, Homo sapiens
  source 1..25: mol_type = unassigned RNA
tcgcagggggactggagaggagacc

SEQ ID NO: 753 - RNA, 25 nt, Homo sapiens
  source 1..25: mol_type = unassigned RNA
acagggagtcgcagggggactggag

SEQ ID NO: 754 - RNA, 25 nt, Homo sapiens
  source 1..25: mol_type = unassigned RNA
aggaaacagggagtcgcagggggac

SEQ ID NO: 755 - RNA, 25 nt, Homo sapiens
  source 1..25: mol_type = unassigned RNA
agcccaggaaacagggagtcgcagg

SEQ ID NO: 756 - RNA, 25 nt, Homo sapiens
  source 1..25: mol_type = unassigned RNA
tagcccaggaaacagggagtcgcag

SEQ ID NO: 757 - RNA, 25 nt, Homo sapiens
  source 1..25: mol_type = unassigned RNA
ctagcccaggaaacagggagtcgca

SEQ ID NO: 758 - RNA, 25 nt, Homo sapiens
  source 1..25: mol_type = unassigned RNA
actagcccaggaaacagggagtcgc

SEQ ID NO: 759 - RNA, 25 nt, Homo sapiens
  source 1..25: mol_type = unassigned RNA
gggtccaagactagcccaggaaaca

SEQ ID NO: 760 - RNA, 25 nt, Homo sapiens
  source 1..25: mol_type = unassigned RNA
ggggtccaagactagcccaggaaac

SEQ ID NO: 761 - RNA, 25 nt, Homo sapiens
  source 1..25: mol_type = unassigned RNA
ctctcgtggggtccaagactagccc

SEQ ID NO: 762 - RNA, 25 nt, Homo sapiens
  source 1..25: mol_type = unassigned RNA
ggctgaggaacgattctctctcgtg

SEQ ID NO: 763 - RNA, 25 nt, Homo sapiens
  source 1..25: mol_type = unassigned RNA
aggctgaggaacgattctctctcgt

SEQ ID NO: 764 - RNA, 25 nt, Homo sapiens
  source 1..25: mol_type = unassigned RNA
gaggctgaggaacgattctctctcg

SEQ ID NO: 765 - RNA, 25 nt, Homo sapiens
  source 1..25: mol_type = unassigned RNA
tcccgcggagttcaccatgaggctg

SEQ ID NO: 766 - RNA, 25 nt, Homo sapiens
  source 1..25: mol_type = unassigned RNA
ccgacctcccgcggagttcaccatg

SEQ ID NO: 767 - RNA, 25 nt, Homo sapiens
  source 1..25: mol_type = unassigned RNA
gaggaagcagcaatattttaggact

SEQ ID NO: 768 - RNA, 25 nt, Homo sapiens
  source 1..25: mol_type = unassigned RNA
agaggaagcagcaatattttaggac

SEQ ID NO: 769 - RNA, 25 nt, Homo sapiens
  source 1..25: mol_type = unassigned RNA
aaggaagaggaagcagcaatatttt

SEQ ID NO: 770 - RNA, 25 nt, Homo sapiens
  source 1..25: mol_type = unassigned RNA
actactgatgatgcttcaaaggaag

SEQ ID NO: 771 - RNA, 25 nt, Homo sapiens
  source 1..25: mol_type = unassigned RNA
ggtgtgactactgatgatgcttcaa

SEQ ID NO: 772 - RNA, 25 nt, Homo sapiens
  source 1..25: mol_type = unassigned RNA
tggcaagagggcaggccagctgtga

SEQ ID NO: 773 - RNA, 25 nt, Homo sapiens
  source 1..25: mol_type = unassigned RNA
ctggcaagagggcaggccagctgtg

SEQ ID NO: 774 - RNA, 25 nt, Homo sapiens
  source 1..25: mol_type = unassigned RNA
caaataaatatcctggcaagagggc

SEQ ID NO: 775 - RNA, 25 nt, Homo sapiens
  source 1..25: mol_type = unassigned RNA
agcacaaataaatatcctggcaaga

SEQ ID NO: 776 - RNA, 25 nt, Homo sapiens
  source 1..25: mol_type = unassigned RNA
tagcacaaataaatatcctggcaag

SEQ ID NO: 777 - RNA, 25 nt, Homo sapiens
  source 1..25: mol_type = unassigned RNA
gagtgaatagcacaaataaatatcc

SEQ ID NO: 778 - RNA, 25 nt, Homo sapiens
  source 1..25: mol_type = unassigned RNA
acggagaagttacatccaaagggaa

SEQ ID NO: 779 - RNA, 25 nt, Homo sapiens
  source 1..25: mol_type = unassigned RNA
aacggagaagttacatccaaaggga

SEQ ID NO: 780 - RNA, 25 nt, Homo sapiens
  source 1..25: mol_type = unassigned RNA
actgaacggagaagttacatccaaa

SEQ ID NO: 781 - RNA, 25 nt, Homo sapiens
  source 1..25: mol_type = unassigned RNA
aactgaacggagaagttacatccaa

SEQ ID NO: 782 - RNA, 25 nt, Homo sapiens
  source 1..25: mol_type = unassigned RNA
catgcaagaaaaggagggaactgaa

SEQ ID NO: 783 - RNA, 25 nt, Homo sapiens
  source 1..25: mol_type = unassigned RNA
ggacaacttacatgcaagaaaagga

SEQ ID NO: 784 - RNA, 25 nt, Homo sapiens
  source 1..25: mol_type = unassigned RNA
gggacaacttacatgcaagaaaagg

SEQ ID NO: 785 - RNA, 25 nt, Homo sapiens
  source 1..25: mol_type = unassigned RNA
tgggggacaacttacatgcaagaaa

SEQ ID NO: 786 - RNA, 25 nt, Homo sapiens
  source 1..25: mol_type = unassigned RNA
aagtagatggaatactttgggatgg

SEQ ID NO: 787 - RNA, 25 nt, Homo sapiens
  source 1..25: mol_type = unassigned RNA
aaagtagatggaatactttgggatg

SEQ ID NO: 788 - RNA, 25 nt, Homo sapiens
  source 1..25: mol_type = unassigned RNA
aaaagtagatggaatactttgggat

SEQ ID NO: 789 - RNA, 25 nt, Homo sapiens
  source 1..25: mol_type = unassigned RNA
gaaaagtagatggaatactttggga

SEQ ID NO: 790 - RNA, 25 nt, Homo sapiens
  source 1..25: mol_type = unassigned RNA
gatagaaaagtagatggaatacttt

SEQ ID NO: 791 - RNA, 25 nt, Homo sapiens
  source 1..25: mol_type = unassigned RNA
cgatagaaaagtagatggaatactt

SEQ ID NO: 792 - RNA, 25 nt, Homo sapiens
  source 1..25: mol_type = unassigned RNA
aaggggacggcgatagaaaagtaga

SEQ ID NO: 793 - RNA, 25 nt, Homo sapiens
  source 1..25: mol_type = unassigned RNA
ccccagagagggctgcaaaagggga

SEQ ID NO: 794 - RNA, 25 nt, Homo sapiens
  source 1..25: mol_type = unassigned RNA
ccatccccagagagggctgcaaaag

SEQ ID NO: 795 - RNA, 25 nt, Homo sapiens
  source 1..25: mol_type = unassigned RNA
tccatccccagagagggctgcaaaa

SEQ ID NO: 796 - RNA, 25 nt, Homo sapiens
  source 1..25: mol_type = unassigned RNA
gtccatccccagagagggctgcaaa

SEQ ID NO: 797 - RNA, 25 nt, Homo sapiens
  source 1..25: mol_type = unassigned RNA
catttacccagtccatccccagaga

SEQ ID NO: 798 - RNA, 25 nt, Homo sapiens
  source 1..25: mol_type = unassigned RNA
acatttacccagtccatccccagag

SEQ ID NO: 799 - RNA, 25 nt, Homo sapiens
  source 1..25: mol_type = unassigned RNA
agggccaggatctgtgaacggggca

SEQ ID NO: 800 - RNA, 25 nt, Homo sapiens
  source 1..25: mol_type = unassigned RNA
cagggccaggatctgtgaacggggc

SEQ ID NO: 801 - RNA, 25 nt, Homo sapiens
  source 1..25: mol_type = unassigned RNA
ggctcagggccaggatctgtgaacg

SEQ ID NO: 802 - RNA, 25 nt, Homo sapiens
  source 1..25: mol_type = unassigned RNA
tggctcagggccaggatctgtgaac

SEQ ID NO: 803 - RNA, 25 nt, Homo sapiens
  source 1..25: mol_type = unassigned RNA
ctggctcagggccaggatctgtgaa

SEQ ID NO: 804 - RNA, 25 nt, Homo sapiens
  source 1..25: mol_type = unassigned RNA
aggagcacagggctggctcagggcc

SEQ ID NO: 805 - RNA, 25 nt, Homo sapiens
  source 1..25: mol_type = unassigned RNA
gagggaggagcacagggctggctca

SEQ ID NO: 806 - RNA, 25 nt, Homo sapiens
  source 1..25: mol_type = unassigned RNA
ggagggaggagcacagggctggctc

SEQ ID NO: 807 - RNA, 25 nt, Homo sapiens
  source 1..25: mol_type = unassigned RNA
gttgggggagggaggagcacagggc

SEQ ID NO: 808 - RNA, 25 nt, Homo sapiens
  source 1..25: mol_type = unassigned RNA
gagtgttgggggagggaggagcaca

SEQ ID NO: 809 - RNA, 25 nt, Homo sapiens
  source 1..25: mol_type = unassigned RNA
ggagtgttgggggagggaggagcac

SEQ ID NO: 810 - RNA, 25 nt, Homo sapiens
  source 1..25: mol_type = unassigned RNA
gttggtagggagtgttgggggaggg

SEQ ID NO: 811 - RNA, 25 nt, Homo sapiens
  source 1..25: mol_type = unassigned RNA
ggggttggtagggagtgttggggga

SEQ ID NO: 812 - RNA, 25 nt, Homo sapiens
  source 1..25: mol_type = unassigned RNA
gggggttggtagggagtgttggggg

SEQ ID NO: 813 - RNA, 25 nt, Homo sapiens
  source 1..25: mol_type = unassigned RNA
ttagggggttggtagggagtgttgg

SEQ ID NO: 814 - RNA, 25 nt, Homo sapiens
  source 1..25: mol_type = unassigned RNA
attagggggttggtagggagtgttg

SEQ ID NO: 815 - RNA, 25 nt, Homo sapiens
  source 1..25: mol_type = unassigned RNA
gattagggggttggtagggagtgtt

SEQ ID NO: 816 - RNA, 25 nt, Homo sapiens
  source 1..25: mol_type = unassigned RNA
ggattagggggttggtagggagtgt

SEQ ID NO: 817 - RNA, 25 nt, Homo sapiens
  source 1..25: mol_type = unassigned RNA
ggagtaggggattagggggttggta

SEQ ID NO: 818 - RNA, 25 nt, Homo sapiens
  source 1..25: mol_type = unassigned RNA
gggagtaggggattagggggttggt

SEQ ID NO: 819 - RNA, 25 nt, Homo sapiens
  source 1..25: mol_type = unassigned RNA
tggagggagtaggggattagggggt

SEQ ID NO: 820 - RNA, 25 nt, Homo sapiens
  source 1..25: mol_type = unassigned RNA
ggggtggagggagtaggggattagg

SEQ ID NO: 821 - RNA, 25 nt, Homo sapiens
  source 1..25: mol_type = unassigned RNA
gggggtggagggagtaggggattag

SEQ ID NO: 822 - RNA, 25 nt, Homo sapiens
  source 1..25: mol_type = unassigned RNA
ggggggtggagggagtaggggatta

SEQ ID NO: 823 - RNA, 25 nt, Homo sapiens
  source 1..25: mol_type = unassigned RNA
gggggggtggagggagtaggggatt

SEQ ID NO: 824 - RNA, 25 nt, Homo sapiens
  source 1..25: mol_type = unassigned RNA
agtggagggggggtggagggagtag

SEQ ID NO: 825 - RNA, 25 nt, Homo sapiens
  source 1..25: mol_type = unassigned RNA
cagtggagggggggtggagggagta

SEQ ID NO: 826 - RNA, 25 nt, Homo sapiens
  source 1..25: mol_type = unassigned RNA
acagtggagggggggtggagggagt

SEQ ID NO: 827 - RNA, 25 nt, Homo sapiens
  source 1..25: mol_type = unassigned RNA
tggcctacagtggagggggggtgga

SEQ ID NO: 828 - RNA, 25 nt, Homo sapiens
  source 1..25: mol_type = unassigned RNA
gtggcctacagtggagggggggtgg

SEQ ID NO: 829 - RNA, 25 nt, Homo sapiens
  source 1..25: mol_type = unassigned RNA
ccagtggcctacagtggaggggggg

SEQ ID NO: 830 - RNA, 25 nt, Homo sapiens
  source 1..25: mol_type = unassigned RNA
catccagtggcctacagtggagggg

SEQ ID NO: 831 - RNA, 25 nt, Homo sapiens
  source 1..25: mol_type = unassigned RNA
ccatccagtggcctacagtggaggg

SEQ ID NO: 832 - RNA, 25 nt, Homo sapiens
  source 1..25: mol_type = unassigned RNA
accatccagtggcctacagtggagg

SEQ ID NO: 833 - RNA, 25 nt, Homo sapiens
  source 1..25: mol_type = unassigned RNA
gaccatccagtggcctacagtggag

SEQ ID NO: 834 - RNA, 25 nt, Homo sapiens
  source 1..25: mol_type = unassigned RNA
tgaccatccagtggcctacagtgga

SEQ ID NO: 835 - RNA, 25 nt, Homo sapiens
  source 1..25: mol_type = unassigned RNA
atgaccatccagtggcctacagtgg

SEQ ID NO: 836 - RNA, 25 nt, Homo sapiens
  source 1..25: mol_type = unassigned RNA
caaatgaccatccagtggcctacag

SEQ ID NO: 837 - RNA, 25 nt, Homo sapiens
  source 1..25: mol_type = unassigned RNA
tacggagatgcaaatgaccatccag

SEQ ID NO: 838 - RNA, 25 nt, Homo sapiens
  source 1..25: mol_type = unassigned RNA
tcagctgaggagcagagcacattta

SEQ ID NO: 839 - RNA, 25 nt, Homo sapiens
  source 1..25: mol_type = unassigned RNA
agtttatttttttctctctcagctg

SEQ ID NO: 840 - RNA, 25 nt, Homo sapiens
  source 1..25: mol_type = unassigned RNA
aggctggctggctggctggctgcta

SEQ ID NO: 841 - RNA, 25 nt, Homo sapiens
  source 1..25: mol_type = unassigned RNA
ggctggctggctggctggctgctaa

SEQ ID NO: 842 - RNA, 25 nt, Homo sapiens
  source 1..25: mol_type = unassigned RNA
gctaagggctgctccacgcttttgc

SEQ ID NO: 843 - RNA, 25 nt, Homo sapiens
  source 1..25: mol_type = unassigned RNA
aagggctgctccacgcttttgccgg

SEQ ID NO: 844 - RNA, 25 nt, Homo sapiens
  source 1..25: mol_type = unassigned RNA
ttttgccggaggacagagactgaca

SEQ ID NO: 845 - RNA, 25 nt, Homo sapiens
  source 1..25: mol_type = unassigned RNA
cggaggacagagactgacatggaac

SEQ ID NO: 846 - RNA, 25 nt, Homo sapiens
  source 1..25: mol_type = unassigned RNA
ggaggacagagactgacatggaaca

SEQ ID NO: 847 - RNA, 25 nt, Homo sapiens
  source 1..25: mol_type = unassigned RNA
gaggacagagactgacatggaacag

SEQ ID NO: 848 - RNA, 25 nt, Homo sapiens
  source 1..25: mol_type = unassigned RNA
acagagactgacatggaacagggga

SEQ ID NO: 849 - RNA, 25 nt, Homo sapiens
  source 1..25: mol_type = unassigned RNA
cagagactgacatggaacaggggaa

SEQ ID NO: 850 - RNA, 25 nt, Homo sapiens
  source 1..25: mol_type = unassigned RNA
actgacatggaacaggggaagggcc

SEQ ID NO: 851 - RNA, 25 nt, Homo sapiens
  source 1..25: mol_type = unassigned RNA
gggaagggcctggctgtcctcatcc

SEQ ID NO: 852 - RNA, 25 nt, Homo sapiens
  source 1..25: mol_type = unassigned RNA
tcatcctggctatcattcttcttca

SEQ ID NO: 853 - RNA, 25 nt, Homo sapiens
  source 1..25: mol_type = unassigned RNA
ctggctatcattcttcttcaaggta

SEQ ID NO: 854 - RNA, 25 nt, Homo sapiens
  source 1..25: mol_type = unassigned RNA
tggctatcattcttcttcaaggtaa

SEQ ID NO: 855 - RNA, 25 nt, Homo sapiens
  source 1..25: mol_type = unassigned RNA
ttcttcttcaaggtaagggcctact

SEQ ID NO: 856 - RNA, 25 nt, Homo sapiens
  source 1..25: mol_type = unassigned RNA
tcttcttcaaggtaagggcctacta

SEQ ID NO: 857 - RNA, 25 nt, Homo sapiens
  source 1..25: mol_type = unassigned RNA
cttcttcaaggtaagggcctactag

SEQ ID NO: 858 - RNA, 25 nt, Homo sapiens
  source 1..25: mol_type = unassigned RNA
tcaaggtaagggcctactaggggtc

SEQ ID NO: 859 - RNA, 25 nt, Homo sapiens
  source 1..25: mol_type = unassigned RNA
tcactggctccacccatcactgttg

SEQ ID NO: 860 - RNA, 25 nt, Homo sapiens
  source 1..25: mol_type = unassigned RNA
atcactggctccacccatcactgtt

SEQ ID NO: 861 - RNA, 25 nt, Homo sapiens
  source 1..25: mol_type = unassigned RNA
gatcactggctccacccatcactgt

SEQ ID NO: 862 - RNA, 25 nt, Homo sapiens
  source 1..25: mol_type = unassigned RNA
gtcggtcggacacgtcgtcgatcac

SEQ ID NO: 863 - RNA, 25 nt, Homo sapiens
  source 1..25: mol_type = unassigned RNA
cagtctctgtcctccggcaaaagcg

SEQ ID NO: 864 - RNA, 25 nt, Homo sapiens
  source 1..25: mol_type = unassigned RNA
ctgttccatgtcagtctctgtcctc

SEQ ID NO: 865 - RNA, 25 nt, Homo sapiens
  source 1..25: mol_type = unassigned RNA
aatgatagccaggatgaggacagcc

SEQ ID NO: 866 - RNA, 25 nt, Homo sapiens
  source 1..25: mol_type = unassigned RNA
ttgaagaagaatgatagccaggatg

SEQ ID NO: 867 - RNA, 25 nt, Homo sapiens
  source 1..25: mol_type = unassigned RNA
cttaccttgaagaagaatgatagcc

SEQ ID NO: 868 - RNA, 25 nt, Homo sapiens
  source 1..25: mol_type = unassigned RNA
ctctcttctgtctttacaggtactt

SEQ ID NO: 869 - RNA, 25 nt, Homo sapiens
  source 1..25: mol_type = unassigned RNA
caggtactttggcccagtcaatcaa

SEQ ID NO: 870 - RNA, 25 nt, Homo sapiens
  source 1..25: mol_type = unassigned RNA
tactttggcccagtcaatcaaaggt

SEQ ID NO: 871 - RNA, 25 nt, Homo sapiens
  source 1..25: mol_type = unassigned RNA
cccagtcaatcaaaggtaggagaaa

SEQ ID NO: 872 - RNA, 25 nt, Homo sapiens
  source 1..25: mol_type = unassigned RNA
ccatttctcctacctttgattgact

SEQ ID NO: 873 - RNA, 25 nt, Homo sapiens
  source 1..25: mol_type = unassigned RNA
gccatttctcctacctttgattgac

SEQ ID NO: 874 - RNA, 25 nt, Homo sapiens
  source 1..25: mol_type = unassigned RNA
gcttttctcatttcaggaaaccact

SEQ ID NO: 875 - RNA, 25 nt, Homo sapiens
  source 1..25: mol_type = unassigned RNA
ctcatttcaggaaaccacttggtta

SEQ ID NO: 876 - RNA, 25 nt, Homo sapiens
  source 1..25: mol_type = unassigned RNA
ttaaggtgtatgactatcaagaaga

SEQ ID NO: 877 - RNA, 25 nt, Homo sapiens
  source 1..25: mol_type = unassigned RNA
gtgtatgactatcaagaagatggtt

SEQ ID NO: 878 - RNA, 25 nt, Homo sapiens
  source 1..25: mol_type = unassigned RNA
tgatgcagaagccaaaaatatcaca

SEQ ID NO: 879 - RNA, 25 nt, Homo sapiens
  source 1..25: mol_type = unassigned RNA
ccaaaaatatcacatggtttaaaga

SEQ ID NO: 880 - RNA, 25 nt, Homo sapiens
  source 1..25: mol_type = unassigned RNA
caaaaatatcacatggtttaaagat

SEQ ID NO: 881 - RNA, 25 nt, Homo sapiens
  source 1..25: mol_type = unassigned RNA
catggtttaaagatgggaagatgat

SEQ ID NO: 882 - RNA, 25 nt, Homo sapiens
  source 1..25: mol_type = unassigned RNA
cttcctaactgaagataaaaaaaaa

SEQ ID NO: 883 - RNA, 25 nt, Homo sapiens
  source 1..25: mol_type = unassigned RNA
actgaagataaaaaaaaatggaatc

SEQ ID NO: 884 - RNA, 25 nt, Homo sapiens
  source 1..25: mol_type = unassigned RNA
ctgaagataaaaaaaaatggaatct

SEQ ID NO: 885 - RNA, 25 nt, Homo sapiens
  source 1..25: mol_type = unassigned RNA
aaatggaatctgggaagtaatgcca

SEQ ID NO: 886 - RNA, 25 nt, Homo sapiens
  source 1..25: mol_type = unassigned RNA
tgggaagtaatgccaaggaccctcg

SEQ ID NO: 887 - RNA, 25 nt, Homo sapiens
  source 1..25: mol_type = unassigned RNA
gggaagtaatgccaaggaccctcga

SEQ ID NO: 888 - RNA, 25 nt, Homo sapiens
  source 1..25: mol_type = unassigned RNA
accctcgagggatgtatcagtgtaa

SEQ ID NO: 889 - RNA, 25 nt, Homo sapiens
  source 1..25: mol_type = unassigned RNA
tattacagaagtatgtaatcccctt

SEQ ID NO: 890 - RNA, 25 nt, Homo sapiens
  source 1..25: mol_type = unassigned RNA
tggtttcctgaaatgagaaaagccg

SEQ ID NO: 891 - RNA, 25 nt, Homo sapiens
  source 1..25: mol_type = unassigned RNA
ttgatagtcatacaccttaaccaag

SEQ ID NO: 892 - RNA, 25 nt, Homo sapiens
  source 1..25: mol_type = unassigned RNA
ccatctttaaaccatgtgatatttt

SEQ ID NO: 893 - RNA, 25 nt, Homo sapiens
  source 1..25: mol_type = unassigned RNA
attccatttttttttatcttcagtt

SEQ ID NO: 894 - RNA, 25 nt, Homo sapiens
  source 1..25: mol_type = unassigned RNA
cactgatacatccctcgagggtcct

SEQ ID NO: 895 - RNA, 25 nt, Homo sapiens
  source 1..25: mol_type = unassigned RNA
tcctttacactgatacatccctcga

SEQ ID NO: 896 - RNA, 25 nt, Homo sapiens
  source 1..25: mol_type = unassigned RNA
atcctttacactgatacatccctcg

SEQ ID NO: 897 - RNA, 25 nt, Homo sapiens
  source 1..25: mol_type = unassigned RNA
acatacttctgtaatacacttggag

SEQ ID NO: 898 - RNA, 25 nt, Homo sapiens
  source 1..25: mol_type = unassigned RNA
ggattacatacttctgtaatacact

SEQ ID NO: 899 - RNA, 25 nt, Homo sapiens
  source 1..25: mol_type = unassigned RNA
ttgaactaaatgcagccaccatatc

SEQ ID NO: 900 - RNA, 25 nt, Homo sapiens
  source 1..25: mol_type = unassigned RNA
tcgtcagcattttcgtccttgctgt

SEQ ID NO: 901 - RNA, 25 nt, Homo sapiens
  source 1..25: mol_type = unassigned RNA
cgtcagcattttcgtccttgctgtt

SEQ ID NO: 902 - RNA, 25 nt, Homo sapiens
  source 1..25: mol_type = unassigned RNA
gtcagcattttcgtccttgctgttg

SEQ ID NO: 903 - RNA, 25 nt, Homo sapiens
  source 1..25: mol_type = unassigned RNA
ttgctgttggggtctacttcattgc

SEQ ID NO: 904 - RNA, 25 nt, Homo sapiens
  source 1..25: mol_type = unassigned RNA
gttggggtctacttcattgctggac

SEQ ID NO: 905 - RNA, 25 nt, Homo sapiens
  source 1..25: mol_type = unassigned RNA
gggtctacttcattgctggacagga

SEQ ID NO: 906 - RNA, 25 nt, Homo sapiens
  source 1..25: mol_type = unassigned RNA
gacaggatggagttcgccagtcgag

SEQ ID NO: 907 - RNA, 25 nt, Homo sapiens
  source 1..25: mol_type = unassigned RNA
gcagttctgacacactgtagggaaa

SEQ ID NO: 908 - RNA, 25 nt, Homo sapiens
  source 1..25: mol_type = unassigned RNA
ttcaatgcagttctgacacactgta

SEQ ID NO: 909 - RNA, 25 nt, Homo sapiens
  source 1..25: mol_type = unassigned RNA
gttcaatgcagttctgacacactgt

SEQ ID NO: 910 - RNA, 25 nt, Homo sapiens
  source 1..25: mol_type = unassigned RNA
tcagcaaagagaaagccagatatgg

SEQ ID NO: 911 - RNA, 25 nt, Homo sapiens
  source 1..25: mol_type = unassigned RNA
atttcagcaaagagaaagccagata

SEQ ID NO: 912 - RNA, 25 nt, Homo sapiens
  source 1..25: mol_type = unassigned RNA
agcaatgaagtagaccccaacagca

SEQ ID NO: 913 - RNA, 25 nt, Homo sapiens
  source 1..25: mol_type = unassigned RNA
taagagcattcttttacctctcgac

SEQ ID NO: 914 - RNA, 25 nt, Homo sapiens
  source 1..25: mol_type = unassigned RNA
ctgttgcccaatgaccagctctacc

SEQ ID NO: 915 - RNA, 25 nt, Homo sapiens
  source 1..25: mol_type = unassigned RNA
gcccaatgaccagctctaccaggta

SEQ ID NO: 916 - RNA, 25 nt, Homo sapiens
  source 1..25: mol_type = unassigned RNA
cccaatgaccagctctaccaggtaa

SEQ ID NO: 917 - RNA, 25 nt, Homo sapiens
  source 1..25: mol_type = unassigned RNA
ccaatgaccagctctaccaggtaag

SEQ ID NO: 918 - RNA, 25 nt, Homo sapiens
  source 1..25: mol_type = unassigned RNA
cccttacctggtagagctggtcatt

SEQ ID NO: 919 - RNA, 25 nt, Homo sapiens
  source 1..25: mol_type = unassigned RNA
ccccttacctggtagagctggtcat

SEQ ID NO: 920 - RNA, 25 nt, Homo sapiens
  source 1..25: mol_type = unassigned RNA
tcttcatccccttacctggtagagc

SEQ ID NO: 921 - RNA, 25 nt, Homo sapiens
  source 1..25: mol_type = unassigned RNA
ctcttttattcttcatccccttacc

SEQ ID NO: 922 - RNA, 25 nt, Homo sapiens
  source 1..25: mol_type = unassigned RNA
ctgtgctgtcctttccagcccctca

SEQ ID NO: 923 - RNA, 25 nt, Homo sapiens
  source 1..25: mol_type = unassigned RNA
aagatgaccagtacagccaccttca

SEQ ID NO: 924 - RNA, 25 nt, Homo sapiens
  source 1..25: mol_type = unassigned RNA
cagccaccttcaaggaaaccagttg

SEQ ID NO: 925 - RNA, 25 nt, Homo sapiens
  source 1..25: mol_type = unassigned RNA
ccaccttcaaggaaaccagttgagg

SEQ ID NO: 926 - RNA, 25 nt, Homo sapiens
  source 1..25: mol_type = unassigned RNA
aaccagttgaggaggaattgaactc

SEQ ID NO: 927 - RNA, 25 nt, Homo sapiens
  source 1..25: mol_type = unassigned RNA
aggaattgaactcaggactcagagt

SEQ ID NO: 928 - RNA, 25 nt, Homo sapiens
  source 1..25: mol_type = unassigned RNA
aattgaactcaggactcagagtagg

SEQ ID NO: 929 - RNA, 25 nt, Homo sapiens
  source 1..25: mol_type = unassigned RNA
attgaactcaggactcagagtaggt

SEQ ID NO: 930 - RNA, 25 nt, Homo sapiens
  source 1..25: mol_type = unassigned RNA
cttctcgatccttgaggggctggaa

SEQ ID NO: 931 - RNA, 25 nt, Homo sapiens
  source 1..25: mol_type = unassigned RNA
gtcatcttctcgatccttgaggggc

SEQ ID NO: 932 - RNA, 25 nt, Homo sapiens
  source 1..25: mol_type = unassigned RNA
actggtcatcttctcgatccttgag

SEQ ID NO: 933 - RNA, 25 nt, Homo sapiens
  source 1..25: mol_type = unassigned RNA
tactggtcatcttctcgatccttga

SEQ ID NO: 934 - RNA, 25 nt, Homo sapiens
  source 1..25: mol_type = unassigned RNA
gtactggtcatcttctcgatccttg

SEQ ID NO: 935 - RNA, 25 nt, Homo sapiens
  source 1..25: mol_type = unassigned RNA
ctggtttccttgaaggtggctgtac

SEQ ID NO: 936 - RNA, 25 nt, Homo sapiens
  source 1..25: mol_type = unassigned RNA
cctcctcaactggtttccttgaagg

SEQ ID NO: 937 - RNA, 25 nt, Homo sapiens
  source 1..25: mol_type = unassigned RNA
attcctcctcaactggtttccttga

SEQ ID NO: 938 - RNA, 25 nt, Homo sapiens
  source 1..25: mol_type = unassigned RNA
gtcctgagttcaattcctcctcaac

SEQ ID NO: 939 - RNA, 25 nt, Homo sapiens
  source 1..25: mol_type = unassigned RNA
attgcaatttttcttttttcagtcc

SEQ ID NO: 940 - RNA, 25 nt, Homo sapiens
  source 1..25: mol_type = unassigned RNA
ttcccagaatcaaagcaatgcattt

SEQ ID NO: 941 - RNA, 25 nt, Homo sapiens
  source 1..25: mol_type = unassigned RNA
actttcagccctaaatctagactca

SEQ ID NO: 942 - RNA, 25 nt, Homo sapiens
  source 1..25: mol_type = unassigned RNA
actcaaggttcccagagatgacaaa

SEQ ID NO: 943 - RNA, 25 nt, Homo sapiens
  source 1..25: mol_type = unassigned RNA
cccagagatgacaaatggagaagaa

SEQ ID NO: 944 - RNA, 25 nt, Homo sapiens
  source 1..25: mol_type = unassigned RNA
agaagaaaggccatcagagcaaatt

SEQ ID NO: 945 - RNA, 25 nt, Homo sapiens
  source 1..25: mol_type = unassigned RNA
gaagaaaggccatcagagcaaattt

SEQ ID NO: 946 - RNA, 25 nt, Homo sapiens
  source 1..25: mol_type = unassigned RNA
aagaaaggccatcagagcaaatttg

SEQ ID NO: 947 - RNA, 25 nt, Homo sapiens
  source 1..25: mol_type = unassigned RNA
agaaaggccatcagagcaaatttgg

SEQ ID NO: 948 - RNA, 25 nt, Homo sapiens
  source 1..25: mol_type = unassigned RNA
actgtgtttcagaagcgccacctat

SEQ ID NO: 949 - RNA, 25 nt, Homo sapiens
  source 1..25: mol_type = unassigned RNA
ctgtgtttcagaagcgccacctatt

SEQ ID NO: 950 - RNA, 25 nt, Homo sapiens
  source 1..25: mol_type = unassigned RNA
tgtgtttcagaagcgccacctattg

SEQ ID NO: 951 - RNA, 25 nt, Homo sapiens
  source 1..25: mol_type = unassigned RNA
aaaatgaaaagatcaaataaccccc

SEQ ID NO: 952 - RNA, 25 nt, Homo sapiens
  source 1..25: mol_type = unassigned RNA
gggaactgaataggaggagaacacc

SEQ ID NO: 953 - RNA, 25 nt, Homo sapiens
  source 1..25: mol_type = unassigned RNA
gctttgattctgggaactgaatagg

SEQ ID NO: 954 - RNA, 25 nt, Homo sapiens
  source 1..25: mol_type = unassigned RNA
attgctttgattctgggaactgaat

SEQ ID NO: 955 - RNA, 25 nt, Homo sapiens
  source 1..25: mol_type = unassigned RNA
ttccaaaatgcattgctttgattct

SEQ ID NO: 956 - RNA, 25 nt, Homo sapiens
  source 1..25: mol_type = unassigned RNA
tttccaaaatgcattgctttgattc

SEQ ID NO: 957 - RNA, 25 nt, Homo sapiens
  source 1..25: mol_type = unassigned RNA
atttagggctgaaagtctctctgct

SEQ ID NO: 958 - RNA, 25 nt, Homo sapiens
  source 1..25: mol_type = unassigned RNA
tctgggaaccttgagtctagattta

SEQ ID NO: 959 - RNA, 25 nt, Homo sapiens
  source 1..25: mol_type = unassigned RNA
ctctgggaaccttgagtctagattt

SEQ ID NO: 960 - RNA, 25 nt, Homo sapiens
  source 1..25: mol_type = unassigned RNA
cctttcttctccatttgtcatctct

SEQ ID NO: 961 - RNA, 25 nt, Homo sapiens
  source 1..25: mol_type = unassigned RNA
gcctttcttctccatttgtcatctc

SEQ ID NO: 962 - RNA, 25 nt, Homo sapiens
  source 1..25: mol_type = unassigned RNA
tgagaaacccccaaatttgctctga

SEQ ID NO: 963 - RNA, 25 nt, Homo sapiens
  source 1..25: mol_type = unassigned RNA
ttcttttacaattttccccaatagg

SEQ ID NO: 964 - RNA, 25 nt, Homo sapiens
  source 1..25: mol_type = unassigned RNA
tttttcttttacaattttccccaat

SEQ ID NO: 965 - RNA, 25 nt, Homo sapiens
  source 1..25: mol_type = unassigned RNA
acaaaaaattatattcaaatccagg

SEQ ID NO: 966 - RNA, 25 nt, Homo sapiens
  source 1..25: mol_type = unassigned RNA
cacaaaaaattatattcaaatccag

SEQ ID NO: 967 - RNA, 25 nt, Homo sapiens
  source 1..25: mol_type = unassigned RNA
acacaaaaaattatattcaaatcca

SEQ ID NO: 968 - RNA, 25 nt, Homo sapiens
  source 1..25: mol_type = unassigned RNA
aacacaaaaaattatattcaaatcc

SEQ ID NO: 969 - RNA, 25 nt, Homo sapiens
  source 1..25: mol_type = unassigned RNA
ccagagaagccaatcagtgtcgtcg

SEQ ID NO: 970 - RNA, 25 nt, Homo sapiens
  source 1..25: mol_type = unassigned RNA
tgttctaaagcccgcacgcacccac

SEQ ID NO: 971 - RNA, 25 nt, Homo sapiens
  source 1..25: mol_type = unassigned RNA
gttctaaagcccgcacgcacccacc

SEQ ID NO: 972 - RNA, 25 nt, Homo sapiens
  source 1..25: mol_type = unassigned RNA
ggactcagattctccccagacgccg

SEQ ID NO: 973 - RNA, 25 nt, Homo sapiens
  source 1..25: mol_type = unassigned RNA
tcagattctccccagacgccgagga

SEQ ID NO: 974 - RNA, 25 nt, Homo sapiens
  source 1..25: mol_type = unassigned RNA
ccccagacgccgaggatggccgtca

SEQ ID NO: 975 - RNA, 25 nt, Homo sapiens
  source 1..25: mol_type = unassigned RNA
ccccgaaccctcctcctgctactct

SEQ ID NO: 976 - RNA, 25 nt, Homo sapiens
  source 1..25: mol_type = unassigned RNA
cccgaaccctcctcctgctactctc

SEQ ID NO: 977 - RNA, 25 nt, Homo sapiens
  source 1..25: mol_type = unassigned RNA
ccgaaccctcctcctgctactctcg

SEQ ID NO: 978 - RNA, 25 nt, Homo sapiens
  source 1..25: mol_type = unassigned RNA
cgaaccctcctcctgctactctcgg

SEQ ID NO: 979 - RNA, 25 nt, Homo sapiens
  source 1..25: mol_type = unassigned RNA
ctcctcctgctactctcgggggccc

SEQ ID NO: 980 - RNA, 25 nt, Homo sapiens
  source 1..25: mol_type = unassigned RNA
gggggccctggccctgacccagacc

SEQ ID NO: 981 - RNA, 25 nt, Homo sapiens
  source 1..25: mol_type = unassigned RNA
ggggccctggccctgacccagacct

SEQ ID NO: 982 - RNA, 25 nt, Homo sapiens
  source 1..25: mol_type = unassigned RNA
gccctggccctgacccagacctggg

SEQ ID NO: 983 - RNA, 25 nt, Homo sapiens
  source 1..25: mol_type = unassigned RNA
ccctggccctgacccagacctgggc

SEQ ID NO: 984 - RNA, 25 nt, Homo sapiens
  source 1..25: mol_type = unassigned RNA
tgacccagacctgggcgggtgagtg

SEQ ID NO: 985 - RNA, 25 nt, Homo sapiens
  source 1..25: mol_type = unassigned RNA
gacccagacctgggcgggtgagtgc

SEQ ID NO: 986 - RNA, 25 nt, Homo sapiens
  source 1..25: mol_type = unassigned RNA
acccagacctgggcgggtgagtgcg

SEQ ID NO: 987 - RNA, 25 nt, Homo sapiens
  source 1..25: mol_type = unassigned RNA
agacctgggcgggtgagtgcggggt

SEQ ID NO: 988 - RNA, 25 nt, Homo sapiens
  source 1..25: mol_type = unassigned RNA
gacctgggcgggtgagtgcggggtc

SEQ ID NO: 989 - RNA, 25 nt, Homo sapiens
  source 1..25: mol_type = unassigned RNA
ctgggcgggtgagtgcggggtcggg

SEQ ID NO: 990 - RNA, 25 nt, Homo sapiens
  source 1..25: mol_type = unassigned RNA
tgggcgggtgagtgcggggtcggga

SEQ ID NO: 991 - RNA, 25 nt, Homo sapiens
  source 1..25: mol_type = unassigned RNA
cttctctggaaacccgacacccaat

SEQ ID NO: 992 - RNA, 25 nt, Homo sapiens
  source 1..25: mol_type = unassigned RNA
gcttctctggaaacccgacacccaa

SEQ ID NO: 993 - RNA, 25 nt, Homo sapiens
  source 1..25: mol_type = unassigned RNA
ccgcgacgacactgattggcttctc

SEQ ID NO: 994 - RNA, 25 nt, Homo sapiens
  source 1..25: mol_type = unassigned RNA
gaacagcgaccgcgacgacactgat

SEQ ID NO: 995 - RNA, 25 nt, Homo sapiens
  source 1..25: mol_type = unassigned RNA
aatctgagtcccggtgggtgcgtgc

SEQ ID NO: 996 - RNA, 25 nt, Homo sapiens
  source 1..25: mol_type = unassigned RNA
gaatctgagtcccggtgggtgcgtg

SEQ ID NO: 997 - RNA, 25 nt, Homo sapiens
  source 1..25: mol_type = unassigned RNA
gtctggggagaatctgagtcccggt

SEQ ID NO: 998 - RNA, 25 nt, Homo sapiens
  source 1..25: mol_type = unassigned RNA
cgtctggggagaatctgagtcccgg

SEQ ID NO: 999 - RNA, 25 nt, Homo sapiens
  source 1..25: mol_type = unassigned RNA
cggcgtctggggagaatctgagtcc

SEQ ID NO: 1000 - RNA, 25 nt, Homo sapiens
  source 1..25: mol_type = unassigned RNA
ccatgacggccatcctcggcgtctg

SEQ ID NO: 1001 - RNA, 25 nt, Homo sapiens
  source 1..25: mol_type = unassigned RNA
gccatgacggccatcctcggcgtct

SEQ ID NO: 1002 - RNA, 25 nt, Homo sapiens
  source 1..25: mol_type = unassigned RNA
cgccatgacggccatcctcggcgtc

SEQ ID NO: 1003 - RNA, 25 nt, Homo sapiens
  source 1..25: mol_type = unassigned RNA
ttcggggcgccatgacggccatcct

SEQ ID NO: 1004 - RNA, 25 nt, Homo sapiens
  source 1..25: mol_type = unassigned RNA
aggaggagggttcggggcgccatga

SEQ ID NO: 1005 - RNA, 25 nt, Homo sapiens
  source 1..25: mol_type = unassigned RNA
ccgagagtagcaggaggagggttcg

SEQ ID NO: 1006 - RNA, 25 nt, Homo sapiens
  source 1..25: mol_type = unassigned RNA
cccgagagtagcaggaggagggttc

SEQ ID NO: 1007 - RNA, 25 nt, Homo sapiens
  source 1..25: mol_type = unassigned RNA
ccccgagagtagcaggaggagggtt

SEQ ID NO: 1008 - RNA, 25 nt, Homo sapiens
  source 1..25: mol_type = unassigned RNA
agggcccccgagagtagcaggagga

SEQ ID NO: 1009 - RNA, 25 nt, Homo sapiens
  source 1..25: mol_type = unassigned RNA
cagggcccccgagagtagcaggagg

SEQ ID NO: 1010 - RNA, 25 nt, Homo sapiens
  source 1..25: mol_type = unassigned RNA
ggccagggcccccgagagtagcagg

SEQ ID NO: 1011 - RNA, 25 nt, Homo sapiens
  source 1..25: mol_type = unassigned RNA
cagggccagggcccccgagagtagc

SEQ ID NO: 1012 - RNA, 25 nt, Homo sapiens
  source 1..25: mol_type = unassigned RNA
cccgcccaggtctgggtcagggcca

SEQ ID NO: 1013 - RNA, 25 nt, Homo sapiens
  source 1..25: mol_type = unassigned RNA
acccgcccaggtctgggtcagggcc

SEQ ID NO: 1014 - RNA, 25 nt, Homo sapiens
  source 1..25: mol_type = unassigned RNA
cactcacccgcccaggtctgggtca

SEQ ID NO: 1015 - RNA, 25 nt, Homo sapiens
  source 1..25: mol_type = unassigned RNA
gcactcacccgcccaggtctgggtc

SEQ ID NO: 1016 - RNA, 25 nt, Homo sapiens
  source 1..25: mol_type = unassigned RNA
accccgcactcacccgcccaggtct

SEQ ID NO: 1017 - RNA, 25 nt, Homo sapiens
  source 1..25: mol_type = unassigned RNA
gaccccgcactcacccgcccaggtc

SEQ ID NO: 1018 - RNA, 25 nt, Homo sapiens
  source 1..25: mol_type = unassigned RNA
ctcccgaccccgcactcacccgccc

SEQ ID NO: 1019 - RNA, 25 nt, Homo sapiens
  source 1..25: mol_type = unassigned RNA
ctcgcccccaggctcccactccatg

SEQ ID NO: 1020 - RNA, 25 nt, Homo sapiens
  source 1..25: mol_type = unassigned RNA
gaggtatttcttcacatccgtgtcc

SEQ ID NO: 1021 - RNA, 25 nt, Homo sapiens
  source 1..25: mol_type = unassigned RNA
atttcttcacatccgtgtcccggcc

SEQ ID NO: 1022 - RNA, 25 nt, Homo sapiens
  source 1..25: mol_type = unassigned RNA
tcacatccgtgtcccggcccggccg

SEQ ID NO: 1023 - RNA, 25 nt, Homo sapiens
  source 1..25: mol_type = unassigned RNA
cacatccgtgtcccggcccggccgc

SEQ ID NO: 1024 - RNA, 25 nt, Homo sapiens
  source 1..25: mol_type = unassigned RNA
acatccgtgtcccggcccggccgcg

SEQ ID NO: 1025 - RNA, 25 nt, Homo sapiens
  source 1..25: mol_type = unassigned RNA
cgcggggagccccgcttcatcgccg

SEQ ID NO: 1026 - RNA, 25 nt, Homo sapiens
  source 1..25: mol_type = unassigned RNA
gcggggagccccgcttcatcgccgt

SEQ ID NO: 1027 - RNA, 25 nt, Homo sapiens
  source 1..25: mol_type = unassigned RNA
ccccgcttcatcgccgtgggctacg

SEQ ID NO: 1028 - RNA, 25 nt, Homo sapiens
  source 1..25: mol_type = unassigned RNA
ctacgtggacgacacgcagttcgtg

SEQ ID NO: 1029 - RNA, 25 nt, Homo sapiens
  source 1..25: mol_type = unassigned RNA
gttcgacagcgacgccgcgagccag

SEQ ID NO: 1030 - RNA, 25 nt, Homo sapiens
  source 1..25: mol_type = unassigned RNA
gacagcgacgccgcgagccagagga

SEQ ID NO: 1031 - RNA, 25 nt, Homo sapiens
  source 1..25: mol_type = unassigned RNA
cgccgcgagccagaggatggagccg

SEQ ID NO: 1032 - RNA, 25 nt, Homo sapiens
  source 1..25: mol_type = unassigned RNA
gccgcgagccagaggatggagccgc

SEQ ID NO: 1033 - RNA, 25 nt, Homo sapiens
  source 1..25: mol_type = unassigned RNA
ccagaggatggagccgcgggcgccg

SEQ ID NO: 1034 - RNA, 25 nt, Homo sapiens
  source 1..25: mol_type = unassigned RNA
gagccgcgggcgccgtggatagagc

SEQ ID NO: 1035 - RNA, 25 nt, Homo sapiens
  source 1..25: mol_type = unassigned RNA
ccgcgggcgccgtggatagagcagg

SEQ ID NO: 1036 - RNA, 25 nt, Homo sapiens
  source 1..25: mol_type = unassigned RNA
cgcgggcgccgtggatagagcagga

SEQ ID NO: 1037 - RNA, 25 nt, Homo sapiens
  source 1..25: mol_type = unassigned RNA
gcgggcgccgtggatagagcaggag

SEQ ID NO: 1038 - RNA, 25 nt, Homo sapiens
  source 1..25: mol_type = unassigned RNA
gcgccgtggatagagcaggaggggc

SEQ ID NO: 1039 - RNA, 25 nt, Homo sapiens
  source 1..25: mol_type = unassigned RNA
gatagagcaggaggggccggagtat

SEQ ID NO: 1040 - RNA, 25 nt, Homo sapiens
  source 1..25: mol_type = unassigned RNA
atagagcaggaggggccggagtatt

SEQ ID NO: 1041 - RNA, 25 nt, Homo sapiens
  source 1..25: mol_type = unassigned RNA
caggaggggccggagtattgggacc

SEQ ID NO: 1042 - RNA, 25 nt, Homo sapiens
  source 1..25: mol_type = unassigned RNA
gccggagtattgggaccaggagaca

SEQ ID NO: 1043 - RNA, 25 nt, Homo sapiens
  source 1..25: mol_type = unassigned RNA
tgggaccaggagacacggaatgtga

SEQ ID NO: 1044 - RNA, 25 nt, Homo sapiens
  source 1..25: mol_type = unassigned RNA
aaggcccagtcacagactgaccgag

SEQ ID NO: 1045 - RNA, 25 nt, Homo sapiens
  source 1..25: mol_type = unassigned RNA
cagtcacagactgaccgagtggacc

SEQ ID NO: 1046 - RNA, 25 nt, Homo sapiens
  source 1..25: mol_type = unassigned RNA
agtcacagactgaccgagtggacct

SEQ ID NO: 1047 - RNA, 25 nt, Homo sapiens
  source 1..25: mol_type = unassigned RNA
gtcacagactgaccgagtggacctg

SEQ ID NO: 1048 - RNA, 25 nt, Homo sapiens
  source 1..25: mol_type = unassigned RNA
accgagtggacctggggaccctgcg

SEQ ID NO: 1049 - RNA, 25 nt, Homo sapiens
  source 1..25: mol_type = unassigned RNA
ctgcgcggctactacaaccagagcg

SEQ ID NO: 1050 - RNA, 25 nt, Homo sapiens
  source 1..25: mol_type = unassigned RNA
gcggctactacaaccagagcgaggc

SEQ ID NO: 1051 - RNA, 25 nt, Homo sapiens
  source 1..25: mol_type = unassigned RNA
ccagagcgaggccggtgagtgaccc

SEQ ID NO: 1052 - RNA, 25 nt, Homo sapiens
  source 1..25: mol_type = unassigned RNA
agcgaggccggtgagtgaccccggc

SEQ ID NO: 1053 - RNA, 25 nt, Homo sapiens
  source 1..25: mol_type = unassigned RNA
gcgaggccggtgagtgaccccggcc

SEQ ID NO: 1054 - RNA, 25 nt, Homo sapiens
  source 1..25: mol_type = unassigned RNA
cgaggccggtgagtgaccccggccg

SEQ ID NO: 1055 - RNA, 25 nt, Homo sapiens
  source 1..25: mol_type = unassigned RNA
gaggccggtgagtgaccccggccgg

SEQ ID NO: 1056 - RNA, 25 nt, Homo sapiens
  source 1..25: mol_type = unassigned RNA
ggagtgggagcctgggggcgagcag

SEQ ID NO: 1057 - RNA, 25 nt, Homo sapiens
  source 1..25: mol_type = unassigned RNA
aatacctcatggagtgggagcctgg

SEQ ID NO: 1058 - RNA, 25 nt, Homo sapiens
  source 1..25: mol_type = unassigned RNA
aaatacctcatggagtgggagcctg

SEQ ID NO: 1059 - RNA, 25 nt, Homo sapiens
  source 1..25: mol_type = unassigned RNA
gaaatacctcatggagtgggagcct

SEQ ID NO: 1060 - RNA, 25 nt, Homo sapiens
  source 1..25: mol_type = unassigned RNA
agaaatacctcatggagtgggagcc

SEQ ID NO: 1061 - RNA, 25 nt, Homo sapiens
  source 1..25: mol_type = unassigned RNA
gatgtgaagaaatacctcatggagt

SEQ ID NO: 1062 - RNA, 25 nt, Homo sapiens
  source 1..25: mol_type = unassigned RNA
ggatgtgaagaaatacctcatggag

SEQ ID NO: 1063 - RNA, 25 nt, Homo sapiens
  source 1..25: mol_type = unassigned RNA
gacacggatgtgaagaaatacctca

SEQ ID NO: 1064 - RNA, 25 nt, Homo sapiens
  source 1..25: mol_type = unassigned RNA
ggctccccgcggccgggccgggaca

SEQ ID NO: 1065 - RNA, 25 nt, Homo sapiens
  source 1..25: mol_type = unassigned RNA
aagcggggctccccgcggccgggcc

SEQ ID NO: 1066 - RNA, 25 nt, Homo sapiens
  source 1..25: mol_type = unassigned RNA
gaagcggggctccccgcggccgggc

SEQ ID NO: 1067 - RNA, 25 nt, Homo sapiens
  source 1..25: mol_type = unassigned RNA
cgatgaagcggggctccccgcggcc

SEQ ID NO: 1068 - RNA, 25 nt, Homo sapiens
  source 1..25: mol_type = unassigned RNA
gcgatgaagcggggctccccgcggc

SEQ ID NO: 1069 - RNA, 25 nt, Homo sapiens
  source 1..25: mol_type = unassigned RNA
cacggcgatgaagcggggctccccg

SEQ ID NO: 1070 - RNA, 25 nt, Homo sapiens
  source 1..25: mol_type = unassigned RNA
ccacgtagcccacggcgatgaagcg

SEQ ID NO: 1071 - RNA, 25 nt, Homo sapiens
  source 1..25: mol_type = unassigned RNA
tccacgtagcccacggcgatgaagc

SEQ ID NO: 1072 - RNA, 25 nt, Homo sapiens
  source 1..25: mol_type = unassigned RNA
gtccacgtagcccacggcgatgaag

SEQ ID NO: 1073 - RNA, 25 nt, Homo sapiens
  source 1..25: mol_type = unassigned RNA
aactgcgtgtcgtccacgtagccca

SEQ ID NO: 1074 - RNA, 25 nt, Homo sapiens
  source 1..25: mol_type = unassigned RNA
gcccgcggctccatcctctggctcg

SEQ ID NO: 1075 - RNA, 25 nt, Homo sapiens
  source 1..25: mol_type = unassigned RNA
ccacggcgcccgcggctccatcctc

SEQ ID NO: 1076 - RNA, 25 nt, Homo sapiens
  source 1..25: mol_type = unassigned RNA
cctcctgctctatccacggcgcccg

SEQ ID NO: 1077 - RNA, 25 nt, Homo sapiens
  source 1..25: mol_type = unassigned RNA
actccggcccctcctgctctatcca

SEQ ID NO: 1078 - RNA, 25 nt, Homo sapiens
  source 1..25: mol_type = unassigned RNA
tccgtgtctcctggtcccaatactc

SEQ ID NO: 1079 - RNA, 25 nt, Homo sapiens
  source 1..25: mol_type = unassigned RNA
ctgggccttcacattccgtgtctcc

SEQ ID NO: 1080 - RNA, 25 nt, Homo sapiens
  source 1..25: mol_type = unassigned RNA
aggtccactcggtcagtctgtgact

SEQ ID NO: 1081 - RNA, 25 nt, Homo sapiens
  source 1..25: mol_type = unassigned RNA
caggtccactcggtcagtctgtgac

SEQ ID NO: 1082 - RNA, 25 nt, Homo sapiens
  source 1..25: mol_type = unassigned RNA
gccgcgcagggtccccaggtccact

SEQ ID NO: 1083 - RNA, 25 nt, Homo sapiens
  source 1..25: mol_type = unassigned RNA
gttgtagtagccgcgcagggtcccc

SEQ ID NO: 1084 - RNA, 25 nt, Homo sapiens
  source 1..25: mol_type = unassigned RNA
tcgctctggttgtagtagccgcgca

SEQ ID NO: 1085 - RNA, 25 nt, Homo sapiens
  source 1..25: mol_type = unassigned RNA
ctcgctctggttgtagtagccgcgc

SEQ ID NO: 1086 - RNA, 25 nt, Homo sapiens
  source 1..25: mol_type = unassigned RNA
ccggggtcactcaccggcctcgctc

SEQ ID NO: 1087 - RNA, 25 nt, Homo sapiens
  source 1..25: mol_type = unassigned RNA
tgcgcccccggccggggtcactcac

SEQ ID NO: 1088 - RNA, 25 nt, Homo sapiens
  source 1..25: mol_type = unassigned RNA
gttctcacaccatccagataatgta

SEQ ID NO: 1089 - RNA, 25 nt, Homo sapiens
  source 1..25: mol_type = unassigned RNA
atccagataatgtatggctgcgacg

SEQ ID NO: 1090 - RNA, 25 nt, Homo sapiens
  source 1..25: mol_type = unassigned RNA
tccagataatgtatggctgcgacgt

SEQ ID NO: 1091 - RNA, 25 nt, Homo sapiens
  source 1..25: mol_type = unassigned RNA
ccagataatgtatggctgcgacgtg

SEQ ID NO: 1092 - RNA, 25 nt, Homo sapiens
  source 1..25: mol_type = unassigned RNA
ataatgtatggctgcgacgtggggt

SEQ ID NO: 1093 - RNA, 25 nt, Homo sapiens
  source 1..25: mol_type = unassigned RNA
tgtatggctgcgacgtggggtcgga

SEQ ID NO: 1094 - RNA, 25 nt, Homo sapiens
  source 1..25: mol_type = unassigned RNA
gtatggctgcgacgtggggtcggac

SEQ ID NO: 1095 - RNA, 25 nt, Homo sapiens
  source 1..25: mol_type = unassigned RNA
tggggtcggacgggcgcttcctccg

SEQ ID NO: 1096 - RNA, 25 nt, Homo sapiens
  source 1..25: mol_type = unassigned RNA
ggggtcggacgggcgcttcctccgc

SEQ ID NO: 1097 - RNA, 25 nt, Homo sapiens
  source 1..25: mol_type = unassigned RNA
ggacgggcgcttcctccgcgggtac

SEQ ID NO: 1098 - RNA, 25 nt, Homo sapiens
  source 1..25: mol_type = unassigned RNA
gggcgcttcctccgcgggtaccggc

SEQ ID NO: 1099 - RNA, 25 nt, Homo sapiens
  source 1..25: mol_type = unassigned RNA
gcgggtaccggcaggacgcctacga

SEQ ID NO: 1100 - RNA, 25 nt, Homo sapiens
  source 1..25: mol_type = unassigned RNA
taccggcaggacgcctacgacggca

SEQ ID NO: 1101 - RNA, 25 nt, Homo sapiens
  source 1..25: mol_type = unassigned RNA
ggcaaggattacatcgccctgaacg

SEQ ID NO: 1102 - RNA, 25 nt, Homo sapiens
  source 1..25: mol_type = unassigned RNA
cgccctgaacgaggacctgcgctct

SEQ ID NO: 1103 - RNA, 25 nt, Homo sapiens
  source 1..25: mol_type = unassigned RNA
aacgaggacctgcgctcttggaccg

SEQ ID NO: 1104 - RNA, 25 nt, Homo sapiens
  source 1..25: mol_type = unassigned RNA
gaggacctgcgctcttggaccgcgg

SEQ ID NO: 1105 - RNA, 25 nt, Homo sapiens
  source 1..25: mol_type = unassigned RNA
ctgcgctcttggaccgcggcggaca

SEQ ID NO: 1106 - RNA, 25 nt, Homo sapiens
  source 1..25: mol_type = unassigned RNA
cgctcttggaccgcggcggacatgg

SEQ ID NO: 1107 - RNA, 25 nt, Homo sapiens
  source 1..25: mol_type = unassigned RNA
ggcggctcagatcaccaagcgcaag

SEQ ID NO: 1108 - RNA, 25 nt, Homo sapiens
  source 1..25: mol_type = unassigned RNA
gcggctcagatcaccaagcgcaagt

SEQ ID NO: 1109 - RNA, 25 nt, Homo sapiens
  source 1..25: mol_type = unassigned RNA
gctcagatcaccaagcgcaagtggg

SEQ ID NO: 1110 - RNA, 25 nt, Homo sapiens
  source 1..25: mol_type = unassigned RNA
cagatcaccaagcgcaagtgggagg

SEQ ID NO: 1111 - RNA, 25 nt, Homo sapiens
  source 1..25: mol_type = unassigned RNA
aagcgcaagtgggaggcggcccatg

SEQ ID NO: 1112 - RNA, 25 nt, Homo sapiens
  source 1..25: mol_type = unassigned RNA
cgcaagtgggaggcggcccatgagg

SEQ ID NO: 1113 - RNA, 25 nt, Homo sapiens
  source 1..25: mol_type = unassigned RNA
gaggcggagcagttgagagcctacc

SEQ ID NO: 1114 - RNA, 25 nt, Homo sapiens
  source 1..25: mol_type = unassigned RNA
cggagcagttgagagcctacctgga

SEQ ID NO: 1115 - RNA, 25 nt, Homo sapiens
  source 1..25: mol_type = unassigned RNA
agagcctacctggatggcacgtgcg

SEQ ID NO: 1116 - RNA, 25 nt, Homo sapiens
  source 1..25: mol_type = unassigned RNA
ctacctggatggcacgtgcgtggag

SEQ ID NO: 1117 - RNA, 25 nt, Homo sapiens
  source 1..25: mol_type = unassigned RNA
tgcgtggagtggctccgcagatacc

SEQ ID NO: 1118 - RNA, 25 nt, Homo sapiens
  source 1..25: mol_type = unassigned RNA
agtggctccgcagatacctggagaa

SEQ ID NO: 1119 - RNA, 25 nt, Homo sapiens
  source 1..25: mol_type = unassigned RNA
gtggctccgcagatacctggagaac

SEQ ID NO: 1120 - RNA, 25 nt, Homo sapiens
  source 1..25: mol_type = unassigned RNA
ctccgcagatacctggagaacggga

SEQ ID NO: 1121 - RNA, 25 nt, Homo sapiens
  source 1..25: mol_type = unassigned RNA
aacgggaaggagacgctgcagcgca

SEQ ID NO: 1122 - RNA, 25 nt, Homo sapiens
  source 1..25: mol_type = unassigned RNA
acgggaaggagacgctgcagcgcac

SEQ ID NO: 1123 - RNA, 25 nt, Homo sapiens
  source 1..25: mol_type = unassigned RNA
ggagacgctgcagcgcacgggtacc

SEQ ID NO: 1124 - RNA, 25 nt, Homo sapiens
  source 1..25: mol_type = unassigned RNA
gagacgctgcagcgcacgggtacca

SEQ ID NO: 1125 - RNA, 25 nt, Homo sapiens
  source 1..25: mol_type = unassigned RNA
agacgctgcagcgcacgggtaccag

SEQ ID NO: 1126 - RNA, 25 nt, Homo sapiens
  source 1..25: mol_type = unassigned RNA
tgcagcgcacgggtaccaggggcca

SEQ ID NO: 1127 - RNA, 25 nt, Homo sapiens
  source 1..25: mol_type = unassigned RNA
gcagcgcacgggtaccaggggccac

SEQ ID NO: 1128 - RNA, 25 nt, Homo sapiens
  source 1..25: mol_type = unassigned RNA
cagcgcacgggtaccaggggccacg

SEQ ID NO: 1129 - RNA, 25 nt, Homo sapiens
  source 1..25: mol_type = unassigned RNA
gtgtgagaacctggccccgaccccg

SEQ ID NO: 1130 - RNA, 25 nt, Homo sapiens
  source 1..25: mol_type = unassigned RNA
acattatctggatggtgtgagaacc

SEQ ID NO: 1131 - RNA, 25 nt, Homo sapiens
  source 1..25: mol_type = unassigned RNA
acgtcgcagccatacattatctgga

SEQ ID NO: 1132 - RNA, 25 nt, Homo sapiens
  source 1..25: mol_type = unassigned RNA
ccccacgtcgcagccatacattatc

SEQ ID NO: 1133 - RNA, 25 nt, Homo sapiens
  source 1..25: mol_type = unassigned RNA
gtaggcgtcctgccggtacccgcgg

SEQ ID NO: 1134 - RNA, 25 nt, Homo sapiens
  source 1..25: mol_type = unassigned RNA
gtcgtaggcgtcctgccggtacccg

SEQ ID NO: 1135 - RNA, 25 nt, Homo sapiens
  source 1..25: mol_type = unassigned RNA
atccttgccgtcgtaggcgtcctgc

SEQ ID NO: 1136 - RNA, 25 nt, Homo sapiens
  source 1..25: mol_type = unassigned RNA
agggcgatgtaatccttgccgtcgt

SEQ ID NO: 1137 - RNA, 25 nt, Homo sapiens
  source 1..25: mol_type = unassigned RNA
gtccaagagcgcaggtcctcgttca

SEQ ID NO: 1138 - RNA, 25 nt, Homo sapiens
  source 1..25: mol_type = unassigned RNA
ggtccaagagcgcaggtcctcgttc

SEQ ID NO: 1139 - RNA, 25 nt, Homo sapiens
  source 1..25: mol_type = unassigned RNA
catgtccgccgcggtccaagagcgc

SEQ ID NO: 1140 - RNA, 25 nt, Homo sapiens
  source 1..25: mol_type = unassigned RNA
gtgatctgagccgccatgtccgccg

SEQ ID NO: 1141 - RNA, 25 nt, Homo sapiens
  source 1..25: mol_type = unassigned RNA
tcatgggccgcctcccacttgcgct

SEQ ID NO: 1142 - RNA, 25 nt, Homo sapiens
  source 1..25: mol_type = unassigned RNA
taggctctcaactgctccgcctcat

SEQ ID NO: 1143 - RNA, 25 nt, Homo sapiens
  source 1..25: mol_type = unassigned RNA
gtaggctctcaactgctccgcctca

SEQ ID NO: 1144 - RNA, 25 nt, Homo sapiens
  source 1..25: mol_type = unassigned RNA
cactccacgcacgtgccatccaggt

SEQ ID NO: 1145 - RNA, 25 nt, Homo sapiens
  source 1..25: mol_type = unassigned RNA
gagccactccacgcacgtgccatcc

SEQ ID NO: 1146 - RNA, 25 nt, Homo sapiens
  source 1..25: mol_type = unassigned RNA
ctccttcccgttctccaggtatctg

SEQ ID NO: 1147 - RNA, 25 nt, Homo sapiens
  source 1..25: mol_type = unassigned RNA
ctgcagcgtctccttcccgttctcc

SEQ ID NO: 1148 - RNA, 25 nt, Homo sapiens
  source 1..25: mol_type = unassigned RNA
acccaccaccccatctctgaccatg

SEQ ID NO: 1149 - RNA, 25 nt, Homo sapiens
  source 1..25: mol_type = unassigned RNA
catctctgaccatgaggccaccctg

SEQ ID NO: 1150 - RNA, 25 nt, Homo sapiens
  source 1..25: mol_type = unassigned RNA
tgaccatgaggccaccctgaggtgc

SEQ ID NO: 1151 - RNA, 25 nt, Homo sapiens
  source 1..25: mol_type = unassigned RNA
gaccatgaggccaccctgaggtgct

SEQ ID NO: 1152 - RNA, 25 nt, Homo sapiens
  source 1..25: mol_type = unassigned RNA
gaggccaccctgaggtgctgggccc

SEQ ID NO: 1153 - RNA, 25 nt, Homo sapiens
  source 1..25: mol_type = unassigned RNA
aggccaccctgaggtgctgggccct

SEQ ID NO: 1154 - RNA, 25 nt, Homo sapiens
  source 1..25: mol_type = unassigned RNA
tgctgggccctgggcttctaccctg

SEQ ID NO: 1155 - RNA, 25 nt, Homo sapiens
  source 1..25: mol_type = unassigned RNA
ctaccctgcggagatcacactgacc

SEQ ID NO: 1156 - RNA, 25 nt, Homo sapiens
  source 1..25: mol_type = unassigned RNA
tgcggagatcacactgacctggcag

SEQ ID NO: 1157 - RNA, 25 nt, Homo sapiens
  source 1..25: mol_type = unassigned RNA
gcggagatcacactgacctggcagc

SEQ ID NO: 1158 - RNA, 25 nt, Homo sapiens
  source 1..25: mol_type = unassigned RNA
agatcacactgacctggcagcggga

SEQ ID NO: 1159 - RNA, 25 nt, Homo sapiens
  source 1..25: mol_type = unassigned RNA
gatcacactgacctggcagcgggat

SEQ ID NO: 1160 - RNA, 25 nt, Homo sapiens
  source 1..25: mol_type = unassigned RNA
atcacactgacctggcagcgggatg

SEQ ID NO: 1161 - RNA, 25 nt, Homo sapiens
  source 1..25: mol_type = unassigned RNA
acactgacctggcagcgggatgggg

SEQ ID NO: 1162 - RNA, 25 nt, Homo sapiens
  source 1..25: mol_type = unassigned RNA
cagcgggatggggaggaccagaccc

SEQ ID NO: 1163 - RNA, 25 nt, Homo sapiens
  source 1..25: mol_type = unassigned RNA
gatggggaggaccagacccaggaca

SEQ ID NO: 1164 - RNA, 25 nt, Homo sapiens
  source 1..25: mol_type = unassigned RNA
gaccagacccaggacacggagctcg

SEQ ID NO: 1165 - RNA, 25 nt, Homo sapiens
  source 1..25: mol_type = unassigned RNA
ccaggacacggagctcgtggagacc

SEQ ID NO: 1166 - RNA, 25 nt, Homo sapiens
  source 1..25: mol_type = unassigned RNA
cggagctcgtggagaccaggcctgc

SEQ ID NO: 1167 - RNA, 25 nt, Homo sapiens
  source 1..25: mol_type = unassigned RNA
ggagctcgtggagaccaggcctgca

SEQ ID NO: 1168 - RNA, 25 nt, Homo sapiens
  source 1..25: mol_type = unassigned RNA
gagctcgtggagaccaggcctgcag

SEQ ID NO: 1169 - RNA, 25 nt, Homo sapiens
  source 1..25: mol_type = unassigned RNA
tcgtggagaccaggcctgcagggga

SEQ ID NO: 1170 - RNA, 25 nt, Homo sapiens
  source 1..25: mol_type = unassigned RNA
tgcaggggatggaaccttccagaag

SEQ ID NO: 1171 - RNA, 25 nt, Homo sapiens
  source 1..25: mol_type = unassigned RNA
gcaggggatggaaccttccagaagt

SEQ ID NO: 1172 - RNA, 25 nt, Homo sapiens
  source 1..25: mol_type = unassigned RNA
ggggatggaaccttccagaagtggg

SEQ ID NO: 1173 - RNA, 25 nt, Homo sapiens
  source 1..25: mol_type = unassigned RNA
ggaaccttccagaagtgggcggctg

SEQ ID NO: 1174 - RNA, 25 nt, Homo sapiens
  source 1..25: mol_type = unassigned RNA
accttccagaagtgggcggctgtgg

SEQ ID NO: 1175 - RNA, 25 nt, Homo sapiens
  source 1..25: mol_type = unassigned RNA
agtgggcggctgtggtggtgccttc

SEQ ID NO: 1176 - RNA, 25 nt, Homo sapiens
  source 1..25: mol_type = unassigned RNA
gcggctgtggtggtgccttctggag

SEQ ID NO: 1177 - RNA, 25 nt, Homo sapiens
  source 1..25: mol_type = unassigned RNA
agatacacctgccatgtgcagcatg

SEQ ID NO: 1178 - RNA, 25 nt, Homo sapiens
  source 1..25: mol_type = unassigned RNA
gatacacctgccatgtgcagcatga

SEQ ID NO: 1179 - RNA, 25 nt, Homo sapiens
  source 1..25: mol_type = unassigned RNA
tctgcccaagcccctcaccctgaga

SEQ ID NO: 1180 - RNA, 25 nt, Homo sapiens
  source 1..25: mol_type = unassigned RNA
ctgcccaagcccctcaccctgagat

SEQ ID NO: 1181 - RNA, 25 nt, Homo sapiens
  source 1..25: mol_type = unassigned RNA
tgcccaagcccctcaccctgagatg

SEQ ID NO: 1182 - RNA, 25 nt, Homo sapiens
  source 1..25: mol_type = unassigned RNA
aagcccctcaccctgagatggggta

SEQ ID NO: 1183 - RNA, 25 nt, Homo sapiens
  source 1..25: mol_type = unassigned RNA
cccctcaccctgagatggggtaagg

SEQ ID NO: 1184 - RNA, 25 nt, Homo sapiens
  source 1..25: mol_type = unassigned RNA
ccctcaccctgagatggggtaagga

SEQ ID NO: 1185 - RNA, 25 nt, Homo sapiens
  source 1..25: mol_type = unassigned RNA
ccctgagatggggtaaggagggaga

SEQ ID NO: 1186 - RNA, 25 nt, Homo sapiens
  source 1..25: mol_type = unassigned RNA
cctgagatggggtaaggagggagat

SEQ ID NO: 1187 - RNA, 25 nt, Homo sapiens
  source 1..25: mol_type = unassigned RNA
ctgagatggggtaaggagggagatg

SEQ ID NO: 1188 - RNA, 25 nt, Homo sapiens
  source 1..25: mol_type = unassigned RNA
tgagatggggtaaggagggagatgg

SEQ ID NO: 1189 - RNA, 25 nt, Homo sapiens
  source 1..25: mol_type = unassigned RNA
catatgtgtcttgggggggtctgac

SEQ ID NO: 1190 - RNA, 25 nt, Homo sapiens
  source 1..25: mol_type = unassigned RNA
tcatatgtgtcttgggggggtctga

SEQ ID NO: 1191 - RNA, 25 nt, Homo sapiens
  source 1..25: mol_type = unassigned RNA
gtggtgggtcatatgtgtcttgggg

SEQ ID NO: 1192 - RNA, 25 nt, Homo sapiens
  source 1..25: mol_type = unassigned RNA
ggtggtgggtcatatgtgtcttggg

SEQ ID NO: 1193 - RNA, 25 nt, Homo sapiens
  source 1..25: mol_type = unassigned RNA
gggtggtgggtcatatgtgtcttgg

SEQ ID NO: 1194 - RNA, 25 nt, Homo sapiens
  source 1..25: mol_type = unassigned RNA
ggggtggtgggtcatatgtgtcttg

SEQ ID NO: 1195 - RNA, 25 nt, Homo sapiens
  source 1..25: mol_type = unassigned RNA
tggggtggtgggtcatatgtgtctt

SEQ ID NO: 1196 - RNA, 25 nt, Homo sapiens
  source 1..25: mol_type = unassigned RNA
atggggtggtgggtcatatgtgtct

SEQ ID NO: 1197 - RNA, 25 nt, Homo sapiens
  source 1..25: mol_type = unassigned RNA
gcctcatggtcagagatggggtggt

SEQ ID NO: 1198 - RNA, 25 nt, Homo sapiens
  source 1..25: mol_type = unassigned RNA
ggcctcatggtcagagatggggtgg

SEQ ID NO: 1199 - RNA, 25 nt, Homo sapiens
  source 1..25: mol_type = unassigned RNA
ggtggcctcatggtcagagatgggg

SEQ ID NO: 1200 - RNA, 25 nt, Homo sapiens
  source 1..25: mol_type = unassigned RNA
cagggtggcctcatggtcagagatg

SEQ ID NO: 1201 - RNA, 25 nt, Homo sapiens
  source 1..25: mol_type = unassigned RNA
tcagggtggcctcatggtcagagat

SEQ ID NO: 1202 - RNA, 25 nt, Homo sapiens
  source 1..25: mol_type = unassigned RNA
ctcagggtggcctcatggtcagaga

SEQ ID NO: 1203 - RNA, 25 nt, Homo sapiens
  source 1..25: mol_type = unassigned RNA
ggcccagcacctcagggtggcctca

SEQ ID NO: 1204 - RNA, 25 nt, Homo sapiens
  source 1..25: mol_type = unassigned RNA
aagcccagggcccagcacctcaggg

SEQ ID NO: 1205 - RNA, 25 nt, Homo sapiens
  source 1..25: mol_type = unassigned RNA
tagaagcccagggcccagcacctca

SEQ ID NO: 1206 - RNA, 25 nt, Homo sapiens
  source 1..25: mol_type = unassigned RNA
gtagaagcccagggcccagcacctc

SEQ ID NO: 1207 - RNA, 25 nt, Homo sapiens
  source 1..25: mol_type = unassigned RNA
gtgatctccgcagggtagaagccca

SEQ ID NO: 1208 - RNA, 25 nt, Homo sapiens
  source 1..25: mol_type = unassigned RNA
tgtgatctccgcagggtagaagccc

SEQ ID NO: 1209 - RNA, 25 nt, Homo sapiens
  source 1..25: mol_type = unassigned RNA
ctgccaggtcagtgtgatctccgca

SEQ ID NO: 1210 - RNA, 25 nt, Homo sapiens
  source 1..25: mol_type = unassigned RNA
gctgccaggtcagtgtgatctccgc

SEQ ID NO: 1211 - RNA, 25 nt, Homo sapiens
  source 1..25: mol_type = unassigned RNA
gtctggtcctccccatcccgctgcc

SEQ ID NO: 1212 - RNA, 25 nt, Homo sapiens
  source 1..25: mol_type = unassigned RNA
ctccacgagctccgtgtcctgggtc

SEQ ID NO: 1213 - RNA, 25 nt, Homo sapiens
  source 1..25: mol_type = unassigned RNA
ctggtctccacgagctccgtgtcct

SEQ ID NO: 1214 - RNA, 25 nt, Homo sapiens
  source 1..25: mol_type = unassigned RNA
cctggtctccacgagctccgtgtcc

SEQ ID NO: 1215 - RNA, 25 nt, Homo sapiens
  source 1..25: mol_type = unassigned RNA
tggaaggttccatcccctgcaggcc

SEQ ID NO: 1216 - RNA, 25 nt, Homo sapiens
  source 1..25: mol_type = unassigned RNA
acttctggaaggttccatcccctgc

SEQ ID NO: 1217 - RNA, 25 nt, Homo sapiens
  source 1..25: mol_type = unassigned RNA
accaccacagccgcccacttctgga

SEQ ID NO: 1218 - RNA, 25 nt, Homo sapiens
  source 1..25: mol_type = unassigned RNA
aggcaccaccacagccgcccacttc

SEQ ID NO: 1219 - RNA, 25 nt, Homo sapiens
  source 1..25: mol_type = unassigned RNA
aggtgtatctctgctcctctccaga

SEQ ID NO: 1220 - RNA, 25 nt, Homo sapiens
  source 1..25: mol_type = unassigned RNA
ggcagaccctcatgctgcacatggc

SEQ ID NO: 1221 - RNA, 25 nt, Homo sapiens
  source 1..25: mol_type = unassigned RNA
cttgggcagaccctcatgctgcaca

SEQ ID NO: 1222 - RNA, 25 nt, Homo sapiens
  source 1..25: mol_type = unassigned RNA
taccccatctcagggtgaggggctt

SEQ ID NO: 1223 - RNA, 25 nt, Homo sapiens
  source 1..25: mol_type = unassigned RNA
ttaccccatctcagggtgaggggct

SEQ ID NO: 1224 - RNA, 25 nt, Homo sapiens
  source 1..25: mol_type = unassigned RNA
cctccttaccccatctcagggtgag

SEQ ID NO: 1225 - RNA, 25 nt, Homo sapiens
  source 1..25: mol_type = unassigned RNA
ccctccttaccccatctcagggtga

SEQ ID NO: 1226 - RNA, 25 nt, Homo sapiens
  source 1..25: mol_type = unassigned RNA
tccctccttaccccatctcagggtg

SEQ ID NO: 1227 - RNA, 25 nt, Homo sapiens
  source 1..25: mol_type = unassigned RNA
ccatctccctccttaccccatctca

SEQ ID NO: 1228 - RNA, 25 nt, Homo sapiens
  source 1..25: mol_type = unassigned RNA
cccatctccctccttaccccatctc

SEQ ID NO: 1229 - RNA, 25 nt, Homo sapiens
  source 1..25: mol_type = unassigned RNA
tcttcccagcccaccatccccatcg

SEQ ID NO: 1230 - RNA, 25 nt, Homo sapiens
  source 1..25: mol_type = unassigned RNA
cttcccagcccaccatccccatcgt

SEQ ID NO: 1231 - RNA, 25 nt, Homo sapiens
  source 1..25: mol_type = unassigned RNA
ccatccccatcgtgggcatcattgc

SEQ ID NO: 1232 - RNA, 25 nt, Homo sapiens
  source 1..25: mol_type = unassigned RNA
cccatcgtgggcatcattgctggcc

SEQ ID NO: 1233 - RNA, 25 nt, Homo sapiens
  source 1..25: mol_type = unassigned RNA
gcatcattgctggcctggttctcct

SEQ ID NO: 1234 - RNA, 25 nt, Homo sapiens
  source 1..25: mol_type = unassigned RNA
tggttctccttggagctgtgatcac

SEQ ID NO: 1235 - RNA, 25 nt, Homo sapiens
  source 1..25: mol_type = unassigned RNA
cttggagctgtgatcactggagctg

SEQ ID NO: 1236 - RNA, 25 nt, Homo sapiens
  source 1..25: mol_type = unassigned RNA
tggagctgtggtcgctgccgtgatg

SEQ ID NO: 1237 - RNA, 25 nt, Homo sapiens
  source 1..25: mol_type = unassigned RNA
agctgtggtcgctgccgtgatgtgg

SEQ ID NO: 1238 - RNA, 25 nt, Homo sapiens
  source 1..25: mol_type = unassigned RNA
tgtggtcgctgccgtgatgtggagg

SEQ ID NO: 1239 - RNA, 25 nt, Homo sapiens
  source 1..25: mol_type = unassigned RNA
ccgtgatgtggaggaggaagagctc

SEQ ID NO: 1240 - RNA, 25 nt, Homo sapiens
  source 1..25: mol_type = unassigned RNA
tgatgtggaggaggaagagctcagg

SEQ ID NO: 1241 - RNA, 25 nt, Homo sapiens
  source 1..25: mol_type = unassigned RNA
ggaggaggaagagctcaggtggaga

SEQ ID NO: 1242 - RNA, 25 nt, Homo sapiens
  source 1..25: mol_type = unassigned RNA
gaggaggaagagctcaggtggagaa

SEQ ID NO: 1243 - RNA, 25 nt, Homo sapiens
  source 1..25: mol_type = unassigned RNA
aggaggaagagctcaggtggagaag

SEQ ID NO: 1244 - RNA, 25 nt, Homo sapiens
  source 1..25: mol_type = unassigned RNA
aagagctcaggtggagaaggggtga

SEQ ID NO: 1245 - RNA, 25 nt, Homo sapiens
  source 1..25: mol_type = unassigned RNA
agagctcaggtggagaaggggtgaa

SEQ ID NO: 1246 - RNA, 25 nt, Homo sapiens
  source 1..25: mol_type = unassigned RNA
gctcaggtggagaaggggtgaaggg

SEQ ID NO: 1247 - RNA, 25 nt, Homo sapiens
  source 1..25: mol_type = unassigned RNA
ctcaggtggagaaggggtgaagggt

SEQ ID NO: 1248 - RNA, 25 nt, Homo sapiens
  source 1..25: mol_type = unassigned RNA
tcaggtggagaaggggtgaagggtg

SEQ ID NO: 1249 - RNA, 25 nt, Homo sapiens
  source 1..25: mol_type = unassigned RNA
gctctgggaaaagaggggaaggtga

SEQ ID NO: 1250 - RNA, 25 nt, Homo sapiens
  source 1..25: mol_type = unassigned RNA
agctctgggaaaagaggggaaggtg

SEQ ID NO: 1251 - RNA, 25 nt, Homo sapiens
  source 1..25: mol_type = unassigned RNA
aagacagctctgggaaaagagggga

SEQ ID NO: 1252 - RNA, 25 nt, Homo sapiens
  source 1..25: mol_type = unassigned RNA
tgggaagacagctctgggaaaagag

SEQ ID NO: 1253 - RNA, 25 nt, Homo sapiens
  source 1..25: mol_type = unassigned RNA
ctgggaagacagctctgggaaaaga

SEQ ID NO: 1254 - RNA, 25 nt, Homo sapiens
  source 1..25: mol_type = unassigned RNA
gctgggaagacagctctgggaaaag

SEQ ID NO: 1255 - RNA, 25 nt, Homo sapiens
  source 1..25: mol_type = unassigned RNA
gatggtgggctgggaagacagctct

SEQ ID NO: 1256 - RNA, 25 nt, Homo sapiens
  source 1..25: mol_type = unassigned RNA
ggatggtgggctgggaagacagctc

SEQ ID NO: 1257 - RNA, 25 nt, Homo sapiens
  source 1..25: mol_type = unassigned RNA
atgcccacgatggggatggtgggct

SEQ ID NO: 1258 - RNA, 25 nt, Homo sapiens
  source 1..25: mol_type = unassigned RNA
gatgcccacgatggggatggtgggc

SEQ ID NO: 1259 - RNA, 25 nt, Homo sapiens
  source 1..25: mol_type = unassigned RNA
caatgatgcccacgatggggatggt

SEQ ID NO: 1260 - RNA, 25 nt, Homo sapiens
  source 1..25: mol_type = unassigned RNA
gcaatgatgcccacgatggggatgg

SEQ ID NO: 1261 - RNA, 25 nt, Homo sapiens
  source 1..25: mol_type = unassigned RNA
ccagcaatgatgcccacgatgggga

SEQ ID NO: 1262 - RNA, 25 nt, Homo sapiens
  source 1..25: mol_type = unassigned RNA
caggccagcaatgatgcccacgatg

SEQ ID NO: 1263 - RNA, 25 nt, Homo sapiens
  source 1..25: mol_type = unassigned RNA
ccaggccagcaatgatgcccacgat

SEQ ID NO: 1264 - RNA, 25 nt, Homo sapiens
  source 1..25: mol_type = unassigned RNA
accaggccagcaatgatgcccacga

SEQ ID NO: 1265 - RNA, 25 nt, Homo sapiens
  source 1..25: mol_type = unassigned RNA
agtgatcacagctccaaggagaacc

SEQ ID NO: 1266 - RNA, 25 nt, Homo sapiens
  source 1..25: mol_type = unassigned RNA
cacagctccagtgatcacagctcca

SEQ ID NO: 1267 - RNA, 25 nt, Homo sapiens
  source 1..25: mol_type = unassigned RNA
cctgagctcttcctcctccacatca

SEQ ID NO: 1268 - RNA, 25 nt, Homo sapiens
  source 1..25: mol_type = unassigned RNA
gacattttcttctcacagatagaaa

SEQ ID NO: 1269 - RNA, 25 nt, Homo sapiens
  source 1..25: mol_type = unassigned RNA
attttcttctcacagatagaaaagg

SEQ ID NO: 1270 - RNA, 25 nt, Homo sapiens
  source 1..25: mol_type = unassigned RNA
ttttcttctcacagatagaaaagga

SEQ ID NO: 1271 - RNA, 25 nt, Homo sapiens
  source 1..25: mol_type = unassigned RNA
gatagaaaaggagggagttacactc

SEQ ID NO: 1272 - RNA, 25 nt, Homo sapiens
  source 1..25: mol_type = unassigned RNA
acactcaggctgcaagtaagtatga

SEQ ID NO: 1273 - RNA, 25 nt, Homo sapiens
  source 1..25: mol_type = unassigned RNA
ctcaggctgcaagtaagtatgaagg

SEQ ID NO: 1274 - RNA, 25 nt, Homo sapiens
  source 1..25: mol_type = unassigned RNA
tctaccccaggcagtgacagtgccc

SEQ ID NO: 1275 - RNA, 25 nt, Homo sapiens
  source 1..25: mol_type = unassigned RNA
ctaccccaggcagtgacagtgccca

SEQ ID NO: 1276 - RNA, 25 nt, Homo sapiens
  source 1..25: mol_type = unassigned RNA
ctgatgtgtccctcacagcttgtaa

SEQ ID NO: 1277 - RNA, 25 nt, Homo sapiens
  source 1..25: mol_type = unassigned RNA
ctcacagcttgtaaaggtgagagct

SEQ ID NO: 1278 - RNA, 25 nt, Homo sapiens
  source 1..25: mol_type = unassigned RNA
acagcttgtaaaggtgagagcttgg

SEQ ID NO: 1279 - RNA, 25 nt, Homo sapiens
  source 1..25: mol_type = unassigned RNA
gagccctgggcactgtcactgcctg

SEQ ID NO: 1280 - RNA, 25 nt, Homo sapiens
  source 1..25: mol_type = unassigned RNA
agagccctgggcactgtcactgcct

SEQ ID NO: 1281 - RNA, 25 nt, Homo sapiens
  source 1..25: mol_type = unassigned RNA
cagagccctgggcactgtcactgcc

SEQ ID NO: 1282 - RNA, 25 nt, Homo sapiens
  source 1..25: mol_type = unassigned RNA
gctgtgagggacacatcagagccct

SEQ ID NO: 1283 - RNA, 25 nt, Homo sapiens
  source 1..25: mol_type = unassigned RNA
agctgtgagggacacatcagagccc

SEQ ID NO: 1284 - RNA, 25 nt, Homo sapiens
  source 1..25: mol_type = unassigned RNA
aagctctcacctttacaagctgtga

SEQ ID NO: 1285 - RNA, 25 nt, Homo sapiens
  source 1..25: mol_type = unassigned RNA
caagctctcacctttacaagctgtg

SEQ ID NO: 1286 - RNA, 25 nt, Homo sapiens
  source 1..25: mol_type = unassigned RNA
tatagtgtgagacagctgccttgtg

SEQ ID NO: 1287 - RNA, 25 nt, Homo sapiens
  source 1..25: mol_type = unassigned RNA
atagtgtgagacagctgccttgtgt

SEQ ID NO: 1288 - RNA, 25 nt, Homo sapiens
  source 1..25: mol_type = unassigned RNA
gacagctgccttgtgtgggactgag

SEQ ID NO: 1289 - RNA, 25 nt, Homo sapiens
  source 1..25: mol_type = unassigned RNA
aagaaccctgactttgtttctgcaa

SEQ ID NO: 1290 - RNA, 25 nt, Homo sapiens
  source 1..25: mol_type = unassigned RNA
cacctgcatgtgtctgtgttcgtgt

SEQ ID NO: 1291 - RNA, 25 nt, Homo sapiens
  source 1..25: mol_type = unassigned RNA
tctgtgttcgtgtaggcataatgtg

SEQ ID NO: 1292 - RNA, 25 nt, Homo sapiens
  source 1..25: mol_type = unassigned RNA
gtgttcgtgtaggcataatgtgagg

SEQ ID NO: 1293 - RNA, 25 nt, Homo sapiens
  source 1..25: mol_type = unassigned RNA
ttcgtgtaggcataatgtgaggagg

SEQ ID NO: 1294 - RNA, 25 nt, Homo sapiens
  source 1..25: mol_type = unassigned RNA
tcgtgtaggcataatgtgaggaggt

SEQ ID NO: 1295 - RNA, 25 nt, Homo sapiens
  source 1..25: mol_type = unassigned RNA
cgtgtaggcataatgtgaggaggtg

SEQ ID NO: 1296 - RNA, 25 nt, Homo sapiens
  source 1..25: mol_type = unassigned RNA
cccaatcatctttcctgttccagag

SEQ ID NO: 1297 - RNA, 25 nt, Homo sapiens
  source 1..25: mol_type = unassigned RNA
aatcatctttcctgttccagagagg

SEQ ID NO: 1298 - RNA, 25 nt, Homo sapiens
  source 1..25: mol_type = unassigned RNA
atcatctttcctgttccagagaggt

SEQ ID NO: 1299 - RNA, 25 nt, Homo sapiens
  source 1..25: mol_type = unassigned RNA
tcatctttcctgttccagagaggtg

SEQ ID NO: 1300 - RNA, 25 nt, Homo sapiens
  source 1..25: mol_type = unassigned RNA
ttcctgttccagagaggtggggctg

SEQ ID NO: 1301 - RNA, 25 nt, Homo sapiens
  source 1..25: mol_type = unassigned RNA
tgtctccatctctgtctcaacttca

SEQ ID NO: 1302 - RNA, 25 nt, Homo sapiens
  source 1..25: mol_type = unassigned RNA
tactttctcaaattcttgccatgag

SEQ ID NO: 1303 - RNA, 25 nt, Homo sapiens
  source 1..25: mol_type = unassigned RNA
catgagaggttgatgagttaattaa

SEQ ID NO: 1304 - RNA, 25 nt, Homo sapiens
  source 1..25: mol_type = unassigned RNA
cctaaaatttgagagacaaaataaa

SEQ ID NO: 1305 - RNA, 25 nt, Homo sapiens
  source 1..25: mol_type = unassigned RNA
aactcttgcctctcagtcccacaca

SEQ ID NO: 1306 - RNA, 25 nt, Homo sapiens
  source 1..25: mol_type = unassigned RNA
ttcttcaagtcacaaagggaagggc

SEQ ID NO: 1307 - RNA, 25 nt, Homo sapiens
  source 1..25: mol_type = unassigned RNA
agggttcttcaagtcacaaagggaa

SEQ ID NO: 1308 - RNA, 25 nt, Homo sapiens
  source 1..25: mol_type = unassigned RNA
cagggttcttcaagtcacaaaggga

SEQ ID NO: 1309 - RNA, 25 nt, Homo sapiens
  source 1..25: mol_type = unassigned RNA
aagtcagggttcttcaagtcacaaa

SEQ ID NO: 1310 - RNA, 25 nt, Homo sapiens
  source 1..25: mol_type = unassigned RNA
aaagtcagggttcttcaagtcacaa

SEQ ID NO: 1311 - RNA, 25 nt, Homo sapiens
  source 1..25: mol_type = unassigned RNA
aggtgcctttgcagaaacaaagtca

SEQ ID NO: 1312 - RNA, 25 nt, Homo sapiens
  source 1..25: mol_type = unassigned RNA
caggtgcctttgcagaaacaaagtc

SEQ ID NO: 1313 - RNA, 25 nt, Homo sapiens
  source 1..25: mol_type = unassigned RNA
tgcctacacgaacacagacacatgc

SEQ ID NO: 1314 - RNA, 25 nt, Homo sapiens
  source 1..25: mol_type = unassigned RNA
ggtcatggtggacatgggggtgggg

SEQ ID NO: 1315 - RNA, 25 nt, Homo sapiens
  source 1..25: mol_type = unassigned RNA
gagggtcatggtggacatgggggtg

SEQ ID NO: 1316 - RNA, 25 nt, Homo sapiens
  source 1..25: mol_type = unassigned RNA
agagggtcatggtggacatgggggt

SEQ ID NO: 1317 - RNA, 25 nt, Homo sapiens
  source 1..25: mol_type = unassigned RNA
aagagggtcatggtggacatggggg

SEQ ID NO: 1318 - RNA, 25 nt, Homo sapiens
  source 1..25: mol_type = unassigned RNA
gggaagagggtcatggtggacatgg

SEQ ID NO: 1319 - RNA, 25 nt, Homo sapiens
  source 1..25: mol_type = unassigned RNA
tgggaagagggtcatggtggacatg

SEQ ID NO: 1320 - RNA, 25 nt, Homo sapiens
  source 1..25: mol_type = unassigned RNA
gtgggaagagggtcatggtggacat

SEQ ID NO: 1321 - RNA, 25 nt, Homo sapiens
  source 1..25: mol_type = unassigned RNA
cgtgggaagagggtcatggtggaca

SEQ ID NO: 1322 - RNA, 25 nt, Homo sapiens
  source 1..25: mol_type = unassigned RNA
ggtcagcgtgggaagagggtcatgg

SEQ ID NO: 1323 - RNA, 25 nt, Homo sapiens
  source 1..25: mol_type = unassigned RNA
acaggtcagcgtgggaagagggtca

SEQ ID NO: 1324 - RNA, 25 nt, Homo sapiens
  source 1..25: mol_type = unassigned RNA
gggagcacaggtcagcgtgggaaga

SEQ ID NO: 1325 - RNA, 25 nt, Homo sapiens
  source 1..25: mol_type = unassigned RNA
agggagcacaggtcagcgtgggaag

SEQ ID NO: 1326 - RNA, 25 nt, Homo sapiens
  source 1..25: mol_type = unassigned RNA
ttggggagggagcacaggtcagcgt

SEQ ID NO: 1327 - RNA, 25 nt, Homo sapiens
  source 1..25: mol_type = unassigned RNA
attggggagggagcacaggtcagcg

SEQ ID NO: 1328 - RNA, 25 nt, Homo sapiens
  source 1..25: mol_type = unassigned RNA
ggaaagatgattggggagggagcac

SEQ ID NO: 1329 - RNA, 25 nt, Homo sapiens
  source 1..25: mol_type = unassigned RNA
ctggaacaggaaagatgattgggga

SEQ ID NO: 1330 - RNA, 25 nt, Homo sapiens
  source 1..25: mol_type = unassigned RNA
tctggaacaggaaagatgattgggg

SEQ ID NO: 1331 - RNA, 25 nt, Homo sapiens
  source 1..25: mol_type = unassigned RNA
ctctctggaacaggaaagatgattg

SEQ ID NO: 1332 - RNA, 25 nt, Homo sapiens
  source 1..25: mol_type = unassigned RNA
cctctctggaacaggaaagatgatt

SEQ ID NO: 1333 - RNA, 25 nt, Homo sapiens
  source 1..25: mol_type = unassigned RNA
acctctctggaacaggaaagatgat

SEQ ID NO: 1334 - RNA, 25 nt, Homo sapiens
  source 1..25: mol_type = unassigned RNA
cacctcagccccacctctctggaac

SEQ ID NO: 1335 - RNA, 25 nt, Homo sapiens
  source 1..25: mol_type = unassigned RNA
tggagacacctcagccccacctctc

SEQ ID NO: 1336 - RNA, 25 nt, Homo sapiens
  source 1..25: mol_type = unassigned RNA
gtgcaccatgaagttgagacagaga

SEQ ID NO: 1337 - RNA, 25 nt, Homo sapiens
  source 1..25: mol_type = unassigned RNA
actaaggttctaattttaataggga

SEQ ID NO: 1338 - RNA, 25 nt, Homo sapiens
  source 1..25: mol_type = unassigned RNA
ttatactaaggttctaattttaata

SEQ ID NO: 1339 - RNA, 25 nt, Homo sapiens
  source 1..25: mol_type = unassigned RNA
tttatactaaggttctaattttaat

SEQ ID NO: 1340 - RNA, 25 nt, Homo sapiens
  source 1..25: mol_type = unassigned RNA
aatttgagaaagtaaatttatacta

SEQ ID NO: 1341 - RNA, 25 nt, Homo sapiens
  source 1..25: mol_type = unassigned RNA
ctttaattaactcatcaacctctca

SEQ ID NO: 1342 - RNA, 25 nt, Homo sapiens
  source 1..25: mol_type = unassigned RNA
ccatttattttgtctctcaaatttt

SEQ ID NO: 1343 - RNA, 25 nt, Homo sapiens
  source 1..25: mol_type = unassigned RNA
gcacaagaaacacgtggactctgga

SEQ ID NO: 1344 - RNA, 25 nt, Homo sapiens
  source 1..25: mol_type = unassigned RNA
atcagcacaagaaacacgtggactc

SEQ ID NO: 1345 - RNA, 25 nt, Homo sapiens
  source 1..25: mol_type = unassigned RNA
gcaacaaatcagcacaagaaacacg

SEQ ID NO: 1346 - RNA, 25 nt, Homo sapiens
  source 1..25: mol_type = unassigned RNA
ctcagcacagcgaacatgcagattc

SEQ ID NO: 1347 - RNA, 25 nt, Homo sapiens
  source 1..25: mol_type = unassigned RNA
gcacagcgaacatgcagattctgga

SEQ ID NO: 1348 - RNA, 25 nt, Homo sapiens
  source 1..25: mol_type = unassigned RNA
aacatgcagattctggaaggttctc

SEQ ID NO: 1349 - RNA, 25 nt, Homo sapiens
  source 1..25: mol_type = unassigned RNA
gtctttatttgctctctcaaattcc

SEQ ID NO: 1350 - RNA, 25 nt, Homo sapiens
  source 1..25: mol_type = unassigned RNA
ttatattcagattcttattttcagt

SEQ ID NO: 1351 - RNA, 25 nt, Homo sapiens
  source 1..25: mol_type = unassigned RNA
tatattcagattcttattttcagta

SEQ ID NO: 1352 - RNA, 25 nt, Homo sapiens
  source 1..25: mol_type = unassigned RNA
agtgcacgtaaagttgagacagaga

SEQ ID NO: 1353 - RNA, 25 nt, Homo sapiens
  source 1..25: mol_type = unassigned RNA
atggagacatccagccccacctctc

SEQ ID NO: 1354 - RNA, 25 nt, Homo sapiens
  source 1..25: mol_type = unassigned RNA
acctctctggaacaagaaagatgac

SEQ ID NO: 1355 - RNA, 25 nt, Homo sapiens
  source 1..25: mol_type = unassigned RNA
cctctctggaacaagaaagatgact

SEQ ID NO: 1356 - RNA, 25 nt, Homo sapiens
  source 1..25: mol_type = unassigned RNA
ctctctggaacaagaaagatgactg

SEQ ID NO: 1357 - RNA, 25 nt, Homo sapiens
  source 1..25: mol_type = unassigned RNA
tctggaacaagaaagatgactgggg

SEQ ID NO: 1358 - RNA, 25 nt, Homo sapiens
  source 1..25: mol_type = unassigned RNA
agaaagatgactggggaggaaacac

SEQ ID NO: 1359 - RNA, 25 nt, Homo sapiens
  source 1..25: mol_type = unassigned RNA
actggggaggaaacacaggtcagca

SEQ ID NO: 1360 - RNA, 25 nt, Homo sapiens
  source 1..25: mol_type = unassigned RNA
ctggggaggaaacacaggtcagcat

SEQ ID NO: 1361 - RNA, 25 nt, Homo sapiens
  source 1..25: mol_type = unassigned RNA
aggaaacacaggtcagcatgggaac

SEQ ID NO: 1362 - RNA, 25 nt, Homo sapiens
  source 1..25: mol_type = unassigned RNA
ggaaacacaggtcagcatgggaaca

SEQ ID NO: 1363 - RNA, 25 nt, Homo sapiens
  source 1..25: mol_type = unassigned RNA
gaaacacaggtcagcatgggaacag

SEQ ID NO: 1364 - RNA, 25 nt, Homo sapiens
  source 1..25: mol_type = unassigned RNA
gtcagcatgggaacaggggtcacag

SEQ ID NO: 1365 - RNA, 25 nt, Homo sapiens
  source 1..25: mol_type = unassigned RNA
gggaacaggggtcacagtggacaca

SEQ ID NO: 1366 - RNA, 25 nt, Homo sapiens
  source 1..25: mol_type = unassigned RNA
ggaacaggggtcacagtggacacaa

SEQ ID NO: 1367 - RNA, 25 nt, Homo sapiens
  source 1..25: mol_type = unassigned RNA
acaggggtcacagtggacacaaggg

SEQ ID NO: 1368 - RNA, 25 nt, Homo sapiens
  source 1..25: mol_type = unassigned RNA
caggggtcacagtggacacaagggt

SEQ ID NO: 1369 - RNA, 25 nt, Homo sapiens
  source 1..25: mol_type = unassigned RNA
ctccacctcctcacattatgctaac

SEQ ID NO: 1370 - RNA, 25 nt, Homo sapiens
  source 1..25: mol_type = unassigned RNA
tccacctcctcacattatgctaaca

SEQ ID NO: 1371 - RNA, 25 nt, Homo sapiens
  source 1..25: mol_type = unassigned RNA
tgctaacagggacgcagacacattc

SEQ ID NO: 1372 - RNA, 25 nt, Homo sapiens
  source 1..25: mol_type = unassigned RNA
gtgcctttgcagaaagagatgccag

SEQ ID NO: 1373 - RNA, 25 nt, Homo sapiens
  source 1..25: mol_type = unassigned RNA
atgccagaggctcttgaagtcacaa

SEQ ID NO: 1374 - RNA, 25 nt, Homo sapiens
  source 1..25: mol_type = unassigned RNA
tgccagaggctcttgaagtcacaaa

SEQ ID NO: 1375 - RNA, 25 nt, Homo sapiens
  source 1..25: mol_type = unassigned RNA
gccagaggctcttgaagtcacaaag

SEQ ID NO: 1376 - RNA, 25 nt, Homo sapiens
  source 1..25: mol_type = unassigned RNA
agaggctcttgaagtcacaaagggg

SEQ ID NO: 1377 - RNA, 25 nt, Homo sapiens
  source 1..25: mol_type = unassigned RNA
cagtccctcacaagacagctgtctc

SEQ ID NO: 1378 - RNA, 25 nt, Homo sapiens
  source 1..25: mol_type = unassigned RNA
tggattaattaaataagtcaattcc

SEQ ID NO: 1379 - RNA, 25 nt, Homo sapiens
  source 1..25: mol_type = unassigned RNA
tcaaatatttgctatgagaggttga

SEQ ID NO: 1380 - RNA, 25 nt, Homo sapiens
  source 1..25: mol_type = unassigned RNA
tgttttctcaaatatttgctatgag

SEQ ID NO: 1381 - RNA, 25 nt, Homo sapiens
  source 1..25: mol_type = unassigned RNA
ctttcttgttccagagaggtggggc

SEQ ID NO: 1382 - RNA, 25 nt, Homo sapiens
  source 1..25: mol_type = unassigned RNA
tcatctttcttgttccagagaggtg

SEQ ID NO: 1383 - RNA, 25 nt, Homo sapiens
  source 1..25: mol_type = unassigned RNA
gtcatctttcttgttccagagaggt

SEQ ID NO: 1384 - RNA, 25 nt, Homo sapiens
  source 1..25: mol_type = unassigned RNA
agtcatctttcttgttccagagagg

SEQ ID NO: 1385 - RNA, 25 nt, Homo sapiens
  source 1..25: mol_type = unassigned RNA
cccagtcatctttcttgttccagag

SEQ ID NO: 1386 - RNA, 25 nt, Homo sapiens
  source 1..25: mol_type = unassigned RNA
tccctgttagcataatgtgaggagg

SEQ ID NO: 1387 - RNA, 25 nt, Homo sapiens
  source 1..25: mol_type = unassigned RNA
gcgtccctgttagcataatgtgagg

SEQ ID NO: 1388 - RNA, 25 nt, Homo sapiens
  source 1..25: mol_type = unassigned RNA
tctgcgtccctgttagcataatgtg

SEQ ID NO: 1389 - RNA, 25 nt, Homo sapiens
  source 1..25: mol_type = unassigned RNA
gagcctctggcatctctttctgcaa

SEQ ID NO: 1390 - RNA, 25 nt, Homo sapiens
  source 1..25: mol_type = unassigned RNA
tcccctttgtgacttcaagagcctc

SEQ ID NO: 1391 - RNA, 25 nt, Homo sapiens
  source 1..25: mol_type = unassigned RNA
gctgtcttgtgagggactgagatgc

SEQ ID NO: 1392 - RNA, 25 nt, Homo sapiens
  source 1..25: mol_type = unassigned RNA
gtagcctgagacagctgtcttgtga

SEQ ID NO: 1393 - RNA, 25 nt, Homo sapiens
  source 1..25: mol_type = unassigned RNA
tgtagcctgagacagctgtcttgtg

SEQ ID NO: 1394 - RNA, 25 nt, Homo sapiens
  source 1..25: mol_type = unassigned RNA
agctgtgagagacacatcagagccc

SEQ ID NO: 1395 - RNA, 25 nt, Homo sapiens
  source 1..25: mol_type = unassigned RNA
gctgtgagagacacatcagagccct

SEQ ID NO: 1396 - RNA, 25 nt, Homo sapiens
  source 1..25: mol_type = unassigned RNA
cagagccctgggcactgtcgctgcc

SEQ ID NO: 1397 - RNA, 25 nt, Homo sapiens
  source 1..25: mol_type = unassigned RNA
tcgctgcctggagtagaacaaaaac

SEQ ID NO: 1398 - RNA, 25 nt, Homo sapiens
  source 1..25: mol_type = unassigned RNA
acagcttgaaaaggtgagattcttg

SEQ ID NO: 1399 - RNA, 25 nt, Homo sapiens
  source 1..25: mol_type = unassigned RNA
cacagcttgaaaaggtgagattctt

SEQ ID NO: 1400 - RNA, 25 nt, Homo sapiens
  source 1..25: mol_type = unassigned RNA
tcacagcttgaaaaggtgagattct

SEQ ID NO: 1401 - RNA, 25 nt, Homo sapiens
  source 1..25: mol_type = unassigned RNA
ctgatgtgtctctcacagcttgaaa

SEQ ID NO: 1402 - RNA, 25 nt, Homo sapiens
  source 1..25: mol_type = unassigned RNA
ctactccaggcagcgacagtgccca

SEQ ID NO: 1403 - RNA, 25 nt, Homo sapiens
  source 1..25: mol_type = unassigned RNA
tctactccaggcagcgacagtgccc

SEQ ID NO: 1404 - RNA, 25 nt, Homo sapiens
  source 1..25: mol_type = unassigned RNA
gagtagctccctccttttccacctg

SEQ ID NO: 1405 - RNA, 25 nt, Homo sapiens
  source 1..25: mol_type = unassigned RNA
agtagctccctccttttccacctgt

SEQ ID NO: 1406 - RNA, 25 nt, Homo sapiens
  source 1..25: mol_type = unassigned RNA
cgtgtaagtggtgggggtgggagtg

SEQ ID NO: 1407 - RNA, 25 nt, Homo sapiens
  source 1..25: mol_type = unassigned RNA
caggctgcgtgtaagtggtgggggt

SEQ ID NO: 1408 - RNA, 25 nt, Homo sapiens
  source 1..25: mol_type = unassigned RNA
tcaggctgcgtgtaagtggtggggg

SEQ ID NO: 1409 - RNA, 25 nt, Homo sapiens
  source 1..25: mol_type = unassigned RNA
ctctcaggctgcgtgtaagtggtgg

SEQ ID NO: 1410 - RNA, 25 nt, Homo sapiens
  source 1..25: mol_type = unassigned RNA
actctcaggctgcgtgtaagtggtg

SEQ ID NO: 1411 - RNA, 25 nt, Homo sapiens
  source 1..25: mol_type = unassigned RNA
tactctcaggctgcgtgtaagtggt

SEQ ID NO: 1412 - RNA, 25 nt, Homo sapiens
  source 1..25: mol_type = unassigned RNA
ctactctcaggctgcgtgtaagtgg

SEQ ID NO: 1413 - RNA, 25 nt, Homo sapiens
  source 1..25: mol_type = unassigned RNA
gagctactctcaggctgcgtgtaag

SEQ ID NO: 1414 - RNA, 25 nt, Homo sapiens
  source 1..25: mol_type = unassigned RNA
ggtggaaaaggagggagctactctc

SEQ ID NO: 1415 - RNA, 25 nt, Homo sapiens
  source 1..25: mol_type = unassigned RNA
ttttcttcccacaggtggaaaagga

SEQ ID NO: 1416 - RNA, 25 nt, Homo sapiens
  source 1..25: mol_type = unassigned RNA
attttcttcccacaggtggaaaagg

SEQ ID NO: 1417 - RNA, 25 nt, Homo sapiens
  source 1..25: mol_type = unassigned RNA
gacattttcttcccacaggtggaaa

SEQ ID NO: 1418 - RNA, 25 nt, Homo sapiens
  source 1..25: mol_type = unassigned RNA
tcacaggacattttcttcccacagg

SEQ ID NO: 1419 - RNA, 25 nt, Homo sapiens
  source 1..25: mol_type = unassigned RNA
cacagctccgatgaccacaactgct

SEQ ID NO: 1420 - RNA, 25 nt, Homo sapiens
  source 1..25: mol_type = unassigned RNA
gatgaccacaactgctaggacagcc

SEQ ID NO: 1421 - RNA, 25 nt, Homo sapiens
  source 1..25: mol_type = unassigned RNA
gccaggccagcaacaatgcccacga

SEQ ID NO: 1422 - RNA, 25 nt, Homo sapiens
  source 1..25: mol_type = unassigned RNA
ccaggccagcaacaatgcccacgat

SEQ ID NO: 1423 - RNA, 25 nt, Homo sapiens
  source 1..25: mol_type = unassigned RNA
caggccagcaacaatgcccacgatg

SEQ ID NO: 1424 - RNA, 25 nt, Homo sapiens
  source 1..25: mol_type = unassigned RNA
ccagcaacaatgcccacgatgggga

SEQ ID NO: 1425 - RNA, 25 nt, Homo sapiens
  source 1..25: mol_type = unassigned RNA
gcaacaatgcccacgatggggacgg

SEQ ID NO: 1426 - RNA, 25 nt, Homo sapiens
  source 1..25: mol_type = unassigned RNA
aatgcccacgatggggacggtggac

SEQ ID NO: 1427 - RNA, 25 nt, Homo sapiens
  source 1..25: mol_type = unassigned RNA
atgcccacgatggggacggtggact

SEQ ID NO: 1428 - RNA, 25 nt, Homo sapiens
  source 1..25: mol_type = unassigned RNA
cgatggggacggtggactgggaaga

SEQ ID NO: 1429 - RNA, 25 nt, Homo sapiens
  source 1..25: mol_type = unassigned RNA
ggacggtggactgggaagacggctc

SEQ ID NO: 1430 - RNA, 25 nt, Homo sapiens
  source 1..25: mol_type = unassigned RNA
gacggtggactgggaagacggctct

SEQ ID NO: 1431 - RNA, 25 nt, Homo sapiens
  source 1..25: mol_type = unassigned RNA
tggactgggaagacggctctgggaa

SEQ ID NO: 1432 - RNA, 25 nt, Homo sapiens
  source 1..25: mol_type = unassigned RNA
actgggaagacggctctgggaaagg

SEQ ID NO: 1433 - RNA, 25 nt, Homo sapiens
  source 1..25: mol_type = unassigned RNA
ctgggaagacggctctgggaaagga

SEQ ID NO: 1434 - RNA, 25 nt, Homo sapiens
  source 1..25: mol_type = unassigned RNA
tgggaagacggctctgggaaaggag

SEQ ID NO: 1435 - RNA, 25 nt, Homo sapiens
  source 1..25: mol_type = unassigned RNA
ggctctgggaaaggaggggaagatg

SEQ ID NO: 1436 - RNA, 25 nt, Homo sapiens
  source 1..25: mol_type = unassigned RNA
gctctgggaaaggaggggaagatga

SEQ ID NO: 1437 - RNA, 25 nt, Homo sapiens
  source 1..25: mol_type = unassigned RNA
tcaggtagggaaggggtgaggggtg

SEQ ID NO: 1438 - RNA, 25 nt, Homo sapiens
  source 1..25: mol_type = unassigned RNA
ttcaggtagggaaggggtgaggggt

SEQ ID NO: 1439 - RNA, 25 nt, Homo sapiens
  source 1..25: mol_type = unassigned RNA
gttcaggtagggaaggggtgagggg

SEQ ID NO: 1440 - RNA, 25 nt, Homo sapiens
  source 1..25: mol_type = unassigned RNA
agagttcaggtagggaaggggtgag

SEQ ID NO: 1441 - RNA, 25 nt, Homo sapiens
  source 1..25: mol_type = unassigned RNA
aagagttcaggtagggaaggggtga

SEQ ID NO: 1442 - RNA, 25 nt, Homo sapiens
  source 1..25: mol_type = unassigned RNA
gaagagttcaggtagggaaggggtg

SEQ ID NO: 1443 - RNA, 25 nt, Homo sapiens
  source 1..25: mol_type = unassigned RNA
aggaggaagagttcaggtagggaag

SEQ ID NO: 1444 - RNA, 25 nt, Homo sapiens
  source 1..25: mol_type = unassigned RNA
taggaggaagagttcaggtagggaa

SEQ ID NO: 1445 - RNA, 25 nt, Homo sapiens
  source 1..25: mol_type = unassigned RNA
gtaggaggaagagttcaggtaggga

SEQ ID NO: 1446 - RNA, 25 nt, Homo sapiens
  source 1..25: mol_type = unassigned RNA
atgtgtaggaggaagagttcaggta

SEQ ID NO: 1447 - RNA, 25 nt, Homo sapiens
  source 1..25: mol_type = unassigned RNA
gatgtgtaggaggaagagttcaggt

SEQ ID NO: 1448 - RNA, 25 nt, Homo sapiens
  source 1..25: mol_type = unassigned RNA
ctgtgatgtgtaggaggaagagttc

SEQ ID NO: 1449 - RNA, 25 nt, Homo sapiens
  source 1..25: mol_type = unassigned RNA
tgtggtcgctgctgtgatgtgtagg

SEQ ID NO: 1450 - RNA, 25 nt, Homo sapiens
  source 1..25: mol_type = unassigned RNA
agctgtggtcgctgctgtgatgtgt

SEQ ID NO: 1451 - RNA, 25 nt, Homo sapiens
  source 1..25: mol_type = unassigned RNA
ctagcagttgtggtcatcggagctg

SEQ ID NO: 1452 - RNA, 25 nt, Homo sapiens
  source 1..25: mol_type = unassigned RNA
tggctgtcctagcagttgtggtcat

SEQ ID NO: 1453 - RNA, 25 nt, Homo sapiens
  source 1..25: mol_type = unassigned RNA
gctggcctggctgtcctagcagttg

SEQ ID NO: 1454 - RNA, 25 nt, Homo sapiens
  source 1..25: mol_type = unassigned RNA
cccatcgtgggcattgttgctggcc

SEQ ID NO: 1455 - RNA, 25 nt, Homo sapiens
  source 1..25: mol_type = unassigned RNA
ccgtccccatcgtgggcattgttgc

SEQ ID NO: 1456 - RNA, 25 nt, Homo sapiens
  source 1..25: mol_type = unassigned RNA
cttcccagtccaccgtccccatcgt

SEQ ID NO: 1457 - RNA, 25 nt, Homo sapiens
  source 1..25: mol_type = unassigned RNA
tcttcccagtccaccgtccccatcg

SEQ ID NO: 1458 - RNA, 25 nt, Homo sapiens
  source 1..25: mol_type = unassigned RNA
ctcatccccctccttaccccatctc

SEQ ID NO: 1459 - RNA, 25 nt, Homo sapiens
  source 1..25: mol_type = unassigned RNA
tcatccccctccttaccccatctca

SEQ ID NO: 1460 - RNA, 25 nt, Homo sapiens
  source 1..25: mol_type = unassigned RNA
cccctccttaccccatctcagggtg

SEQ ID NO: 1461 - RNA, 25 nt, Homo sapiens
  source 1..25: mol_type = unassigned RNA
ccctccttaccccatctcagggtga

SEQ ID NO: 1462 - RNA, 25 nt, Homo sapiens
  source 1..25: mol_type = unassigned RNA
cctccttaccccatctcagggtgag

SEQ ID NO: 1463 - RNA, 25 nt, Homo sapiens
  source 1..25: mol_type = unassigned RNA
taccccatctcagggtgaggggctt

SEQ ID NO: 1464 - RNA, 25 nt, Homo sapiens
  source 1..25: mol_type = unassigned RNA
cttcggcagcccctcatgctgtaca

SEQ ID NO: 1465 - RNA, 25 nt, Homo sapiens
  source 1..25: mol_type = unassigned RNA
atgtgtatctctgctcttctccaga

SEQ ID NO: 1466 - RNA, 25 nt, Homo sapiens
  source 1..25: mol_type = unassigned RNA
aggcaccaccacagctgcccacttc

SEQ ID NO: 1467 - RNA, 25 nt, Homo sapiens
  source 1..25: mol_type = unassigned RNA
accaccacagctgcccacttctgga

SEQ ID NO: 1468 - RNA, 25 nt, Homo sapiens
  source 1..25: mol_type = unassigned RNA
acttctggaaggttctatctcctgc

SEQ ID NO: 1469 - RNA, 25 nt, Homo sapiens
  source 1..25: mol_type = unassigned RNA
tggaaggttctatctcctgctggtc

SEQ ID NO: 1470 - RNA, 25 nt, Homo sapiens
  source 1..25: mol_type = unassigned RNA
ctccacaagctcagtgtcctgagtt

SEQ ID NO: 1471 - RNA, 25 nt, Homo sapiens
  source 1..25: mol_type = unassigned RNA
gtttggtcctcgccatcccgctgcc

SEQ ID NO: 1472 - RNA, 25 nt, Homo sapiens
  source 1..25: mol_type = unassigned RNA
gctgccaggtcagtgtgatctccgc

SEQ ID NO: 1473 - RNA, 25 nt, Homo sapiens
  source 1..25: mol_type = unassigned RNA
ctgccaggtcagtgtgatctccgca

SEQ ID NO: 1474 - RNA, 25 nt, Homo sapiens
  source 1..25: mol_type = unassigned RNA
tgtgatctccgcagggtagaaaccc

SEQ ID NO: 1475 - RNA, 25 nt, Homo sapiens
  source 1..25: mol_type = unassigned RNA
gtgatctccgcagggtagaaaccca

SEQ ID NO: 1476 - RNA, 25 nt, Homo sapiens
  source 1..25: mol_type = unassigned RNA
gtagaaacccagggcccagcacctc

SEQ ID NO: 1477 - RNA, 25 nt, Homo sapiens
  source 1..25: mol_type = unassigned RNA
tagaaacccagggcccagcacctca

SEQ ID NO: 1478 - RNA, 25 nt, Homo sapiens
  source 1..25: mol_type = unassigned RNA
aaacccagggcccagcacctcaggg

SEQ ID NO: 1479 - RNA, 25 nt, Homo sapiens
  source 1..25: mol_type = unassigned RNA
ggcccagcacctcagggtggcctca

SEQ ID NO: 1480 - RNA, 25 nt, Homo sapiens
  source 1..25: mol_type = unassigned RNA
ctcagggtggcctcatggtcagaga

SEQ ID NO: 1481 - RNA, 25 nt, Homo sapiens
  source 1..25: mol_type = unassigned RNA
tcagggtggcctcatggtcagagat

SEQ ID NO: 1482 - RNA, 25 nt, Homo sapiens
  source 1..25: mol_type = unassigned RNA
cagggtggcctcatggtcagagatg

SEQ ID NO: 1483 - RNA, 25 nt, Homo sapiens
  source 1..25: mol_type = unassigned RNA
ggtggcctcatggtcagagatgggg

SEQ ID NO: 1484 - RNA, 25 nt, Homo sapiens
  source 1..25: mol_type = unassigned RNA
ggcctcatggtcagagatggggtgg

SEQ ID NO: 1485 - RNA, 25 nt, Homo sapiens
  source 1..25: mol_type = unassigned RNA
gcctcatggtcagagatggggtggt

SEQ ID NO: 1486 - RNA, 25 nt, Homo sapiens
  source 1..25: mol_type = unassigned RNA
tggggtggtgggtcacgtgtgtctt

SEQ ID NO: 1487 - RNA, 25 nt, Homo sapiens
  source 1..25: mol_type = unassigned RNA
ggggtggtgggtcacgtgtgtcttt

SEQ ID NO: 1488 - RNA, 25 nt, Homo sapiens
  source 1..25: mol_type = unassigned RNA
gggtggtgggtcacgtgtgtctttg

SEQ ID NO: 1489 - RNA, 25 nt, Homo sapiens
  source 1..25: mol_type = unassigned RNA
ggtggtgggtcacgtgtgtctttgg

SEQ ID NO: 1490 - RNA, 25 nt, Homo sapiens
  source 1..25: mol_type = unassigned RNA
gtggtgggtcacgtgtgtctttggg

SEQ ID NO: 1491 - RNA, 25 nt, Homo sapiens
  source 1..25: mol_type = unassigned RNA
tcacgtgtgtctttggggggtctga

SEQ ID NO: 1492 - RNA, 25 nt, Homo sapiens
  source 1..25: mol_type = unassigned RNA
cacgtgtgtctttggggggtctgat

SEQ ID NO: 1493 - RNA, 25 nt, Homo sapiens
  source 1..25: mol_type = unassigned RNA
gagatggggtaaggagggggatgag

SEQ ID NO: 1494 - RNA, 25 nt, Homo sapiens
  source 1..25: mol_type = unassigned RNA
tgagatggggtaaggagggggatga

SEQ ID NO: 1495 - RNA, 25 nt, Homo sapiens
  source 1..25: mol_type = unassigned RNA
ctgagatggggtaaggagggggatg

SEQ ID NO: 1496 - RNA, 25 nt, Homo sapiens
  source 1..25: mol_type = unassigned RNA
ctcaccctgagatggggtaaggagg

SEQ ID NO: 1497 - RNA, 25 nt, Homo sapiens
  source 1..25: mol_type = unassigned RNA
cctcaccctgagatggggtaaggag

SEQ ID NO: 1498 - RNA, 25 nt, Homo sapiens
  source 1..25: mol_type = unassigned RNA
ccctcaccctgagatggggtaagga

SEQ ID NO: 1499 - RNA, 25 nt, Homo sapiens
  source 1..25: mol_type = unassigned RNA
cccctcaccctgagatggggtaagg

SEQ ID NO: 1500 - RNA, 25 nt, Homo sapiens
  source 1..25: mol_type = unassigned RNA
aagcccctcaccctgagatggggta

SEQ ID NO: 1501 - RNA, 25 nt, Homo sapiens
  source 1..25: mol_type = unassigned RNA
tgccgaagcccctcaccctgagatg

SEQ ID NO: 1502 - RNA, 25 nt, Homo sapiens
  source 1..25: mol_type = unassigned RNA
ctgccgaagcccctcaccctgagat

SEQ ID NO: 1503 - RNA, 25 nt, Homo sapiens
  source 1..25: mol_type = unassigned RNA
gctgccgaagcccctcaccctgaga

SEQ ID NO: 1504 - RNA, 25 nt, Homo sapiens
  source 1..25: mol_type = unassigned RNA
atacacatgccatgtacagcatgag

SEQ ID NO: 1505 - RNA, 25 nt, Homo sapiens
  source 1..25: mol_type = unassigned RNA
gatacacatgccatgtacagcatga

SEQ ID NO: 1506 - RNA, 25 nt, Homo sapiens
  source 1..25: mol_type = unassigned RNA
agatacacatgccatgtacagcatg

SEQ ID NO: 1507 - RNA, 25 nt, Homo sapiens
  source 1..25: mol_type = unassigned RNA
agtgggcagctgtggtggtgccttc

SEQ ID NO: 1508 - RNA, 25 nt, Homo sapiens
  source 1..25: mol_type = unassigned RNA
accttccagaagtgggcagctgtgg

SEQ ID NO: 1509 - RNA, 25 nt, Homo sapiens
  source 1..25: mol_type = unassigned RNA
agaaccttccagaagtgggcagctg

SEQ ID NO: 1510 - RNA, 25 nt, Homo sapiens
  source 1..25: mol_type = unassigned RNA
gcaggagatagaaccttccagaagt

SEQ ID NO: 1511 - RNA, 25 nt, Homo sapiens
  source 1..25: mol_type = unassigned RNA
agcaggagatagaaccttccagaag

SEQ ID NO: 1512 - RNA, 25 nt, Homo sapiens
  source 1..25: mol_type = unassigned RNA
ctgagcttgtggagaccagaccagc

SEQ ID NO: 1513 - RNA, 25 nt, Homo sapiens
  source 1..25: mol_type = unassigned RNA
gaccaaactcaggacactgagcttg

SEQ ID NO: 1514 - RNA, 25 nt, Homo sapiens
  source 1..25: mol_type = unassigned RNA
cagcgggatggcgaggaccaaactc

SEQ ID NO: 1515 - RNA, 25 nt, Homo sapiens
  source 1..25: mol_type = unassigned RNA
acactgacctggcagcgggatggcg

SEQ ID NO: 1516 - RNA, 25 nt, Homo sapiens
  source 1..25: mol_type = unassigned RNA
agatcacactgacctggcagcggga

SEQ ID NO: 1517 - RNA, 25 nt, Homo sapiens
  source 1..25: mol_type = unassigned RNA
gcggagatcacactgacctggcagc

SEQ ID NO: 1518 - RNA, 25 nt, Homo sapiens
  source 1..25: mol_type = unassigned RNA
tgcggagatcacactgacctggcag

SEQ ID NO: 1519 - RNA, 25 nt, Homo sapiens
  source 1..25: mol_type = unassigned RNA
ctaccctgcggagatcacactgacc

SEQ ID NO: 1520 - RNA, 25 nt, Homo sapiens
  source 1..25: mol_type = unassigned RNA
tgctgggccctgggtttctaccctg

SEQ ID NO: 1521 - RNA, 25 nt, Homo sapiens
  source 1..25: mol_type = unassigned RNA
aggccaccctgaggtgctgggccct

SEQ ID NO: 1522 - RNA, 25 nt, Homo sapiens
  source 1..25: mol_type = unassigned RNA
gaggccaccctgaggtgctgggccc

SEQ ID NO: 1523 - RNA, 25 nt, Homo sapiens
  source 1..25: mol_type = unassigned RNA
gaccatgaggccaccctgaggtgct

SEQ ID NO: 1524 - RNA, 25 nt, Homo sapiens
  source 1..25: mol_type = unassigned RNA
tgaccatgaggccaccctgaggtgc

SEQ ID NO: 1525 - RNA, 25 nt, Homo sapiens
  source 1..25: mol_type = unassigned RNA
catctctgaccatgaggccaccctg

SEQ ID NO: 1526 - RNA, 25 nt, Homo sapiens
  source 1..25: mol_type = unassigned RNA
acccaccaccccatctctgaccatg

SEQ ID NO: 1527 - RNA, 25 nt, Homo sapiens
  source 1..25: mol_type = unassigned RNA
ctccagcttgtccttcccgttctcc

SEQ ID NO: 1528 - RNA, 25 nt, Homo sapiens
  source 1..25: mol_type = unassigned RNA
gtccttcccgttctccaggtatctg

SEQ ID NO: 1529 - RNA, 25 nt, Homo sapiens
  source 1..25: mol_type = unassigned RNA
gagccactccacgcactcgccctcc

SEQ ID NO: 1530 - RNA, 25 nt, Homo sapiens
  source 1..25: mol_type = unassigned RNA
cactccacgcactcgccctccaggt

SEQ ID NO: 1531 - RNA, 25 nt, Homo sapiens
  source 1..25: mol_type = unassigned RNA
gtaggctctccgctgctccgcctca

SEQ ID NO: 1532 - RNA, 25 nt, Homo sapiens
  source 1..25: mol_type = unassigned RNA
taggctctccgctgctccgcctcac

SEQ ID NO: 1533 - RNA, 25 nt, Homo sapiens
  source 1..25: mol_type = unassigned RNA
ctcacgggccgcctcccacttgcgc

SEQ ID NO: 1534 - RNA, 25 nt, Homo sapiens
  source 1..25: mol_type = unassigned RNA
tcacgggccgcctcccacttgcgct

SEQ ID NO: 1535 - RNA, 25 nt, Homo sapiens
  source 1..25: mol_type = unassigned RNA
tgggtgatctgagccgccgtgtccg

SEQ ID NO: 1536 - RNA, 25 nt, Homo sapiens
  source 1..25: mol_type = unassigned RNA
gtgatctgagccgccgtgtccgcgg

SEQ ID NO: 1537 - RNA, 25 nt, Homo sapiens
  source 1..25: mol_type = unassigned RNA
tgagccgccgtgtccgcggcggtcc

SEQ ID NO: 1538 - RNA, 25 nt, Homo sapiens
  source 1..25: mol_type = unassigned RNA
cgtgtccgcggcggtccaggagcgc

SEQ ID NO: 1539 - RNA, 25 nt, Homo sapiens
  source 1..25: mol_type = unassigned RNA
ggtccaggagcgcaggtcctcgttc

SEQ ID NO: 1540 - RNA, 25 nt, Homo sapiens
  source 1..25: mol_type = unassigned RNA
gtccaggagcgcaggtcctcgttca

SEQ ID NO: 1541 - RNA, 25 nt, Homo sapiens
  source 1..25: mol_type = unassigned RNA
agggcgatgtaatccttgccgtcgt

SEQ ID NO: 1542 - RNA, 25 nt, Homo sapiens
  source 1..25: mol_type = unassigned RNA
gtaatccttgccgtcgtaggcgtac

SEQ ID NO: 1543 - RNA, 25 nt, Homo sapiens
  source 1..25: mol_type = unassigned RNA
gtcgtaggcgtactggtcatgcccg

SEQ ID NO: 1544 - RNA, 25 nt, Homo sapiens
  source 1..25: mol_type = unassigned RNA
gtaggcgtactggtcatgcccgcgg

SEQ ID NO: 1545 - RNA, 25 nt, Homo sapiens
  source 1..25: mol_type = unassigned RNA
ggcgtactggtcatgcccgcggagg

SEQ ID NO: 1546 - RNA, 25 nt, Homo sapiens
  source 1..25: mol_type = unassigned RNA
catgcccgcggaggaggcgcccgtc

SEQ ID NO: 1547 - RNA, 25 nt, Homo sapiens
  source 1..25: mol_type = unassigned RNA
ccccacgtcgcagccgtacatgctc

SEQ ID NO: 1548 - RNA, 25 nt, Homo sapiens
  source 1..25: mol_type = unassigned RNA
cacgtcgcagccgtacatgctctgg

SEQ ID NO: 1549 - RNA, 25 nt, Homo sapiens
  source 1..25: mol_type = unassigned RNA
acgtcgcagccgtacatgctctgga

SEQ ID NO: 1550 - RNA, 25 nt, Homo sapiens
  source 1..25: mol_type = unassigned RNA
gagcgcgctggtaccaggggcagtg

SEQ ID NO: 1551 - RNA, 25 nt, Homo sapiens
  source 1..25: mol_type = unassigned RNA
ggagcgcgctggtaccaggggcagt

SEQ ID NO: 1552 - RNA, 25 nt, Homo sapiens
  source 1..25: mol_type = unassigned RNA
tggagcgcgctggtaccaggggcag

SEQ ID NO: 1553 - RNA, 25 nt, Homo sapiens
  source 1..25: mol_type = unassigned RNA
acaagctggagcgcgctggtaccag

SEQ ID NO: 1554 - RNA, 25 nt, Homo sapiens
  source 1..25: mol_type = unassigned RNA
gacaagctggagcgcgctggtacca

SEQ ID NO: 1555 - RNA, 25 nt, Homo sapiens
  source 1..25: mol_type = unassigned RNA
ggacaagctggagcgcgctggtacc

SEQ ID NO: 1556 - RNA, 25 nt, Homo sapiens
  source 1..25: mol_type = unassigned RNA
acgggaaggacaagctggagcgcgc

SEQ ID NO: 1557 - RNA, 25 nt, Homo sapiens
  source 1..25: mol_type = unassigned RNA
tacctggagaacgggaaggacaagc

SEQ ID NO: 1558 - RNA, 25 nt, Homo sapiens
  source 1..25: mol_type = unassigned RNA
ctccgcagatacctggagaacggga

SEQ ID NO: 1559 - RNA, 25 nt, Homo sapiens
  source 1..25: mol_type = unassigned RNA
gtggctccgcagatacctggagaac

SEQ ID NO: 1560 - RNA, 25 nt, Homo sapiens
  source 1..25: mol_type = unassigned RNA
agtggctccgcagatacctggagaa

SEQ ID NO: 1561 - RNA, 25 nt, Homo sapiens
  source 1..25: mol_type = unassigned RNA
tgcgtggagtggctccgcagatacc

SEQ ID NO: 1562 - RNA, 25 nt, Homo sapiens
  source 1..25: mol_type = unassigned RNA
ctacctggagggcgagtgcgtggag

SEQ ID NO: 1563 - RNA, 25 nt, Homo sapiens
  source 1..25: mol_type = unassigned RNA
agagcctacctggagggcgagtgcg

SEQ ID NO: 1564 - RNA, 25 nt, Homo sapiens
  source 1..25: mol_type = unassigned RNA
cggagcagcggagagcctacctgga

SEQ ID NO: 1565 - RNA, 25 nt, Homo sapiens
  source 1..25: mol_type = unassigned RNA
gcggagcagcggagagcctacctgg

SEQ ID NO: 1566 - RNA, 25 nt, Homo sapiens
  source 1..25: mol_type = unassigned RNA
gaggcggagcagcggagagcctacc

SEQ ID NO: 1567 - RNA, 25 nt, Homo sapiens
  source 1..25: mol_type = unassigned RNA
ggaggcggcccgtgaggcggagcag

SEQ ID NO: 1568 - RNA, 25 nt, Homo sapiens
  source 1..25: mol_type = unassigned RNA
cgcaagtgggaggcggcccgtgagg

SEQ ID NO: 1569 - RNA, 25 nt, Homo sapiens
  source 1..25: mol_type = unassigned RNA
cagcgcaagtgggaggcggcccgtg

SEQ ID NO: 1570 - RNA, 25 nt, Homo sapiens
  source 1..25: mol_type = unassigned RNA
cagatcacccagcgcaagtgggagg

SEQ ID NO: 1571 - RNA, 25 nt, Homo sapiens
  source 1..25: mol_type = unassigned RNA
gctcagatcacccagcgcaagtggg

SEQ ID NO: 1572 - RNA, 25 nt, Homo sapiens
  source 1..25: mol_type = unassigned RNA
gcggctcagatcacccagcgcaagt

SEQ ID NO: 1573 - RNA, 25 nt, Homo sapiens
  source 1..25: mol_type = unassigned RNA
ggcggctcagatcacccagcgcaag

SEQ ID NO: 1574 - RNA, 25 nt, Homo sapiens
  source 1..25: mol_type = unassigned RNA
cgctcctggaccgccgcggacacgg

SEQ ID NO: 1575 - RNA, 25 nt, Homo sapiens
  source 1..25: mol_type = unassigned RNA
ctgcgctcctggaccgccgcggaca

SEQ ID NO: 1576 - RNA, 25 nt, Homo sapiens
  source 1..25: mol_type = unassigned RNA
gaggacctgcgctcctggaccgccg

SEQ ID NO: 1577 - RNA, 25 nt, Homo sapiens
  source 1..25: mol_type = unassigned RNA
cgccctgaacgaggacctgcgctcc

SEQ ID NO: 1578 - RNA, 25 nt, Homo sapiens
  source 1..25: mol_type = unassigned RNA
ggcaaggattacatcgccctgaacg

SEQ ID NO: 1579 - RNA, 25 nt, Homo sapiens
  source 1..25: mol_type = unassigned RNA
catgaccagtacgcctacgacggca

SEQ ID NO: 1580 - RNA, 25 nt, Homo sapiens
  source 1..25: mol_type = unassigned RNA
gcgggcatgaccagtacgcctacga

SEQ ID NO: 1581 - RNA, 25 nt, Homo sapiens
  source 1..25: mol_type = unassigned RNA
ggggccggacgggcgcctcctccgc

SEQ ID NO: 1582 - RNA, 25 nt, Homo sapiens
  source 1..25: mol_type = unassigned RNA
tggggccggacgggcgcctcctccg

SEQ ID NO: 1583 - RNA, 25 nt, Homo sapiens
  source 1..25: mol_type = unassigned RNA
gtacggctgcgacgtggggccggac

SEQ ID NO: 1584 - RNA, 25 nt, Homo sapiens
  source 1..25: mol_type = unassigned RNA
tgtacggctgcgacgtggggccgga

SEQ ID NO: 1585 - RNA, 25 nt, Homo sapiens
  source 1..25: mol_type = unassigned RNA
agcatgtacggctgcgacgtggggc

SEQ ID NO: 1586 - RNA, 25 nt, Homo sapiens
  source 1..25: mol_type = unassigned RNA
ccagagcatgtacggctgcgacgtg

SEQ ID NO: 1587 - RNA, 25 nt, Homo sapiens
  source 1..25: mol_type = unassigned RNA
tccagagcatgtacggctgcgacgt

SEQ ID NO: 1588 - RNA, 25 nt, Homo sapiens
  source 1..25: mol_type = unassigned RNA
ctccagagcatgtacggctgcgacg

SEQ ID NO: 1589 - RNA, 25 nt, Homo sapiens
  source 1..25: mol_type = unassigned RNA
cctctcacaccctccagagcatgta

SEQ ID NO: 1590 - RNA, 25 nt, Homo sapiens
  source 1..25: mol_type = unassigned RNA
tgcgccccgggccggggtcactcac

SEQ ID NO: 1591 - RNA, 25 nt, Homo sapiens
  source 1..25: mol_type = unassigned RNA
ccggggtcactcaccggcctcgctc

SEQ ID NO: 1592 - RNA, 25 nt, Homo sapiens
  source 1..25: mol_type = unassigned RNA
ctcgctctggttgtagtagccgcgc

SEQ ID NO: 1593 - RNA, 25 nt, Homo sapiens
  source 1..25: mol_type = unassigned RNA
gttgtagtagccgcgcaggttccgc

SEQ ID NO: 1594 - RNA, 25 nt, Homo sapiens
  source 1..25: mol_type = unassigned RNA
gccgcgcaggttccgcaggctctct

SEQ ID NO: 1595 - RNA, 25 nt, Homo sapiens
  source 1..25: mol_type = unassigned RNA
caggctctctcggtcagtctgtgcc

SEQ ID NO: 1596 - RNA, 25 nt, Homo sapiens
  source 1..25: mol_type = unassigned RNA
aggctctctcggtcagtctgtgcct

SEQ ID NO: 1597 - RNA, 25 nt, Homo sapiens
  source 1..25: mol_type = unassigned RNA
ctgggccttgtagatctgtgtgttc

SEQ ID NO: 1598 - RNA, 25 nt, Homo sapiens
  source 1..25: mol_type = unassigned RNA
tctgtgtgttccggtcccaatactc

SEQ ID NO: 1599 - RNA, 25 nt, Homo sapiens
  source 1..25: mol_type = unassigned RNA
actccggcccctcctgctctatcca

SEQ ID NO: 1600 - RNA, 25 nt, Homo sapiens
  source 1..25: mol_type = unassigned RNA
cctcctgctctatccacggcgcccg

SEQ ID NO: 1601 - RNA, 25 nt, Homo sapiens
  source 1..25: mol_type = unassigned RNA
tccacggcgcccgcggctcctctct

SEQ ID NO: 1602 - RNA, 25 nt, Homo sapiens
  source 1..25: mol_type = unassigned RNA
gcccgcggctcctctctcggactcg

SEQ ID NO: 1603 - RNA, 25 nt, Homo sapiens
  source 1..25: mol_type = unassigned RNA
ggcgtcgctgtcgaacctcacgaac

SEQ ID NO: 1604 - RNA, 25 nt, Homo sapiens
  source 1..25: mol_type = unassigned RNA
gcgtcgctgtcgaacctcacgaact

SEQ ID NO: 1605 - RNA, 25 nt, Homo sapiens
  source 1..25: mol_type = unassigned RNA
gtccacgtagcccactgagatgaag

SEQ ID NO: 1606 - RNA, 25 nt, Homo sapiens
  source 1..25: mol_type = unassigned RNA
tccacgtagcccactgagatgaagc

SEQ ID NO: 1607 - RNA, 25 nt, Homo sapiens
  source 1..25: mol_type = unassigned RNA
ccacgtagcccactgagatgaagcg

SEQ ID NO: 1608 - RNA, 25 nt, Homo sapiens
  source 1..25: mol_type = unassigned RNA
cactgagatgaagcggggctccccg

SEQ ID NO: 1609 - RNA, 25 nt, Homo sapiens
  source 1..25: mol_type = unassigned RNA
gagatgaagcggggctccccgcggc

SEQ ID NO: 1610 - RNA, 25 nt, Homo sapiens
  source 1..25: mol_type = unassigned RNA
agatgaagcggggctccccgcggcc

SEQ ID NO: 1611 - RNA, 25 nt, Homo sapiens
  source 1..25: mol_type = unassigned RNA
gaagcggggctccccgcggccgggc

SEQ ID NO: 1612 - RNA, 25 nt, Homo sapiens
  source 1..25: mol_type = unassigned RNA
aagcggggctccccgcggccgggcc

SEQ ID NO: 1613 - RNA, 25 nt, Homo sapiens
  source 1..25: mol_type = unassigned RNA
ggctccccgcggccgggccgggaca

SEQ ID NO: 1614 - RNA, 25 nt, Homo sapiens
  source 1..25: mol_type = unassigned RNA
tccccgcggccgggccgggacacgg

SEQ ID NO: 1615 - RNA, 25 nt, Homo sapiens
  source 1..25: mol_type = unassigned RNA
gacacggaggtgtagaaatacctca

SEQ ID NO: 1616 - RNA, 25 nt, Homo sapiens
  source 1..25: mol_type = unassigned RNA
ggaggtgtagaaatacctcatggag

SEQ ID NO: 1617 - RNA, 25 nt, Homo sapiens
  source 1..25: mol_type = unassigned RNA
gaggtgtagaaatacctcatggagt

SEQ ID NO: 1618 - RNA, 25 nt, Homo sapiens
  source 1..25: mol_type = unassigned RNA
agaaatacctcatggagtgggagcc

SEQ ID NO: 1619 - RNA, 25 nt, Homo sapiens
  source 1..25: mol_type = unassigned RNA
gaaatacctcatggagtgggagcct

SEQ ID NO: 1620 - RNA, 25 nt, Homo sapiens
  source 1..25: mol_type = unassigned RNA
aaatacctcatggagtgggagcctg

SEQ ID NO: 1621 - RNA, 25 nt, Homo sapiens
  source 1..25: mol_type = unassigned RNA
aatacctcatggagtgggagcctgg

SEQ ID NO: 1622 - RNA, 25 nt, Homo sapiens
  source 1..25: mol_type = unassigned RNA
ctcatggagtgggagcctgggggtg

SEQ ID NO: 1623 - RNA, 25 nt, Homo sapiens
  source 1..25: mol_type = unassigned RNA
atggagtgggagcctgggggtgagg

SEQ ID NO: 1624 - RNA, 25 nt, Homo sapiens
  source 1..25: mol_type = unassigned RNA
tggagtgggagcctgggggtgagga

SEQ ID NO: 1625 - RNA, 25 nt, Homo sapiens
  source 1..25: mol_type = unassigned RNA
ggagtgggagcctgggggtgaggag

SEQ ID NO: 1626 - RNA, 25 nt, Homo sapiens
  source 1..25: mol_type = unassigned RNA
gaggccggtgagtgaccccggcccg

SEQ ID NO: 1627 - RNA, 25 nt, Homo sapiens
  source 1..25: mol_type = unassigned RNA
cgaggccggtgagtgaccccggccc

SEQ ID NO: 1628 - RNA, 25 nt, Homo sapiens
  source 1..25: mol_type = unassigned RNA
gcgaggccggtgagtgaccccggcc

SEQ ID NO: 1629 - RNA, 25 nt, Homo sapiens
  source 1..25: mol_type = unassigned RNA
ccagagcgaggccggtgagtgaccc

SEQ ID NO: 1630 - RNA, 25 nt, Homo sapiens
  source 1..25: mol_type = unassigned RNA
gcggctactacaaccagagcgaggc

SEQ ID NO: 1631 - RNA, 25 nt, Homo sapiens
  source 1..25: mol_type = unassigned RNA
ctgcgcggctactacaaccagagcg

SEQ ID NO: 1632 - RNA, 25 nt, Homo sapiens
  source 1..25: mol_type = unassigned RNA
accgagagagcctgcggaacctgcg

SEQ ID NO: 1633 - RNA, 25 nt, Homo sapiens
  source 1..25: mol_type = unassigned RNA
ggcacagactgaccgagagagcctg

SEQ ID NO: 1634 - RNA, 25 nt, Homo sapiens
  source 1..25: mol_type = unassigned RNA
cggaacacacagatctacaaggccc

SEQ ID NO: 1635 - RNA, 25 nt, Homo sapiens
  source 1..25: mol_type = unassigned RNA
tgggaccggaacacacagatctaca

SEQ ID NO: 1636 - RNA, 25 nt, Homo sapiens
  source 1..25: mol_type = unassigned RNA
gcaggaggggccggagtattgggac

SEQ ID NO: 1637 - RNA, 25 nt, Homo sapiens
  source 1..25: mol_type = unassigned RNA
atagagcaggaggggccggagtatt

SEQ ID NO: 1638 - RNA, 25 nt, Homo sapiens
  source 1..25: mol_type = unassigned RNA
gatagagcaggaggggccggagtat

SEQ ID NO: 1639 - RNA, 25 nt, Homo sapiens
  source 1..25: mol_type = unassigned RNA
gcgccgtggatagagcaggaggggc

SEQ ID NO: 1640 - RNA, 25 nt, Homo sapiens
  source 1..25: mol_type = unassigned RNA
gcgggcgccgtggatagagcaggag

SEQ ID NO: 1641 - RNA, 25 nt, Homo sapiens
  source 1..25: mol_type = unassigned RNA
cgcgggcgccgtggatagagcagga

SEQ ID NO: 1642 - RNA, 25 nt, Homo sapiens
  source 1..25: mol_type = unassigned RNA
ccgcgggcgccgtggatagagcagg

SEQ ID NO: 1643 - RNA, 25 nt, Homo sapiens
  source 1..25: mol_type = unassigned RNA
gagccgcgggcgccgtggatagagc

SEQ ID NO: 1644 - RNA, 25 nt, Homo sapiens
  source 1..25: mol_type = unassigned RNA
tccgagagaggagccgcgggcgccg

SEQ ID NO: 1645 - RNA, 25 nt, Homo sapiens
  source 1..25: mol_type = unassigned RNA
gccgcgagtccgagagaggagccgc

SEQ ID NO: 1646 - RNA, 25 nt, Homo sapiens
  source 1..25: mol_type = unassigned RNA
cgccgcgagtccgagagaggagccg

SEQ ID NO: 1647 - RNA, 25 nt, Homo sapiens
  source 1..25: mol_type = unassigned RNA
gacagcgacgccgcgagtccgagag

SEQ ID NO: 1648 - RNA, 25 nt, Homo sapiens
  source 1..25: mol_type = unassigned RNA
ctacgtggacgacacccagttcgtg

SEQ ID NO: 1649 - RNA, 25 nt, Homo sapiens
  source 1..25: mol_type = unassigned RNA
ccccgcttcatctcagtgggctacg

SEQ ID NO: 1650 - RNA, 25 nt, Homo sapiens
  source 1..25: mol_type = unassigned RNA
gcggggagccccgcttcatctcagt

SEQ ID NO: 1651 - RNA, 25 nt, Homo sapiens
  source 1..25: mol_type = unassigned RNA
cgcggggagccccgcttcatctcag

SEQ ID NO: 1652 - RNA, 25 nt, Homo sapiens
  source 1..25: mol_type = unassigned RNA
acctccgtgtcccggcccggccgcg

SEQ ID NO: 1653 - RNA, 25 nt, Homo sapiens
  source 1..25: mol_type = unassigned RNA
cacctccgtgtcccggcccggccgc

SEQ ID NO: 1654 - RNA, 25 nt, Homo sapiens
  source 1..25: mol_type = unassigned RNA
acacctccgtgtcccggcccggccg

SEQ ID NO: 1655 - RNA, 25 nt, Homo sapiens
  source 1..25: mol_type = unassigned RNA
atttctacacctccgtgtcccggcc

SEQ ID NO: 1656 - RNA, 25 nt, Homo sapiens
  source 1..25: mol_type = unassigned RNA
gaggtatttctacacctccgtgtcc

SEQ ID NO: 1657 - RNA, 25 nt, Homo sapiens
  source 1..25: mol_type = unassigned RNA
ctcacccccaggctcccactccatg

SEQ ID NO: 1658 - RNA, 25 nt, Homo sapiens
  source 1..25: mol_type = unassigned RNA
catttccctcccgacccgcactcac

SEQ ID NO: 1659 - RNA, 25 nt, Homo sapiens
  source 1..25: mol_type = unassigned RNA
cctcccgacccgcactcaccggccc

SEQ ID NO: 1660 - RNA, 25 nt, Homo sapiens
  source 1..25: mol_type = unassigned RNA
gacccgcactcaccggcccaggtct

SEQ ID NO: 1661 - RNA, 25 nt, Homo sapiens
  source 1..25: mol_type = unassigned RNA
gcactcaccggcccaggtctcggtc

SEQ ID NO: 1662 - RNA, 25 nt, Homo sapiens
  source 1..25: mol_type = unassigned RNA
cactcaccggcccaggtctcggtca

SEQ ID NO: 1663 - RNA, 25 nt, Homo sapiens
  source 1..25: mol_type = unassigned RNA
accggcccaggtctcggtcagggcc

SEQ ID NO: 1664 - RNA, 25 nt, Homo sapiens
  source 1..25: mol_type = unassigned RNA
ccggcccaggtctcggtcagggcca

SEQ ID NO: 1665 - RNA, 25 nt, Homo sapiens
  source 1..25: mol_type = unassigned RNA
cagggccagggccgccgagagcagc

SEQ ID NO: 1666 - RNA, 25 nt, Homo sapiens
  source 1..25: mol_type = unassigned RNA
ggccagggccgccgagagcagcagg

SEQ ID NO: 1667 - RNA, 25 nt, Homo sapiens
  source 1..25: mol_type = unassigned RNA
agggccgccgagagcagcaggagga

SEQ ID NO: 1668 - RNA, 25 nt, Homo sapiens
  source 1..25: mol_type = unassigned RNA
cgccgagagcagcaggaggacggtt

SEQ ID NO: 1669 - RNA, 25 nt, Homo sapiens
  source 1..25: mol_type = unassigned RNA
gccgagagcagcaggaggacggttc

SEQ ID NO: 1670 - RNA, 25 nt, Homo sapiens
  source 1..25: mol_type = unassigned RNA
ccgagagcagcaggaggacggttcg

SEQ ID NO: 1671 - RNA, 25 nt, Homo sapiens
  source 1..25: mol_type = unassigned RNA
gttcggggcgccatgaccagcatct

SEQ ID NO: 1672 - RNA, 25 nt, Homo sapiens
  source 1..25: mol_type = unassigned RNA
gccatgaccagcatctcggcgtctg

SEQ ID NO: 1673 - RNA, 25 nt, Homo sapiens
  source 1..25: mol_type = unassigned RNA
tcggcgtctgaggagactctgagtc

SEQ ID NO: 1674 - RNA, 25 nt, Homo sapiens
  source 1..25: mol_type = unassigned RNA
cggcgtctgaggagactctgagtcc

SEQ ID NO: 1675 - RNA, 25 nt, Homo sapiens
  source 1..25: mol_type = unassigned RNA
cgtctgaggagactctgagtccggg

SEQ ID NO: 1676 - RNA, 25 nt, Homo sapiens
  source 1..25: mol_type = unassigned RNA
gtctgaggagactctgagtccgggt

SEQ ID NO: 1677 - RNA, 25 nt, Homo sapiens
  source 1..25: mol_type = unassigned RNA
gagactctgagtccgggtgggtgcg

SEQ ID NO: 1678 - RNA, 25 nt, Homo sapiens
  source 1..25: mol_type = unassigned RNA
agactctgagtccgggtgggtgcgt

SEQ ID NO: 1679 - RNA, 25 nt, Homo sapiens
  source 1..25: mol_type = unassigned RNA
gactctgagtccgggtgggtgcgtg

SEQ ID NO: 1680 - RNA, 25 nt, Homo sapiens
  source 1..25: mol_type = unassigned RNA
ggtgggtgcgtggggactttagaac

SEQ ID NO: 1681 - RNA, 25 nt, Homo sapiens
  source 1..25: mol_type = unassigned RNA
gtgggtgcgtggggactttagaact

SEQ ID NO: 1682 - RNA, 25 nt, Homo sapiens
  source 1..25: mol_type = unassigned RNA
cgtggggactttagaactgggaccg

SEQ ID NO: 1683 - RNA, 25 nt, Homo sapiens
  source 1..25: mol_type = unassigned RNA
gaactgggaccgcggcgacgctgat

SEQ ID NO: 1684 - RNA, 25 nt, Homo sapiens
  source 1..25: mol_type = unassigned RNA
ctgggccggtgagtgcgggtcggga

SEQ ID NO: 1685 - RNA, 25 nt, Homo sapiens
  source 1..25: mol_type = unassigned RNA
cctgggccggtgagtgcgggtcggg

SEQ ID NO: 1686 - RNA, 25 nt, Homo sapiens
  source 1..25: mol_type = unassigned RNA
agacctgggccggtgagtgcgggtc

SEQ ID NO: 1687 - RNA, 25 nt, Homo sapiens
  source 1..25: mol_type = unassigned RNA
gagacctgggccggtgagtgcgggt

SEQ ID NO: 1688 - RNA, 25 nt, Homo sapiens
  source 1..25: mol_type = unassigned RNA
gaccgagacctgggccggtgagtgc

SEQ ID NO: 1689 - RNA, 25 nt, Homo sapiens
  source 1..25: mol_type = unassigned RNA
tgaccgagacctgggccggtgagtg

SEQ ID NO: 1690 - RNA, 25 nt, Homo sapiens
  source 1..25: mol_type = unassigned RNA
ccctggccctgaccgagacctgggc

SEQ ID NO: 1691 - RNA, 25 nt, Homo sapiens
  source 1..25: mol_type = unassigned RNA
gcggccctggccctgaccgagacct

SEQ ID NO: 1692 - RNA, 25 nt, Homo sapiens
  source 1..25: mol_type = unassigned RNA
ggcggccctggccctgaccgagacc

SEQ ID NO: 1693 - RNA, 25 nt, Homo sapiens
  source 1..25: mol_type = unassigned RNA
gtcctcctgctgctctcggcggccc

SEQ ID NO: 1694 - RNA, 25 nt, Homo sapiens
  source 1..25: mol_type = unassigned RNA
cgaaccgtcctcctgctgctctcgg

SEQ ID NO: 1695 - RNA, 25 nt, Homo sapiens
  source 1..25: mol_type = unassigned RNA
ccccgaaccgtcctcctgctgctct

SEQ ID NO: 1696 - RNA, 25 nt, Homo sapiens
  source 1..25: mol_type = unassigned RNA
tcctcagacgccgagatgctggtca

SEQ ID NO: 1697 - RNA, 25 nt, Homo sapiens
  source 1..25: mol_type = unassigned RNA
agagtctcctcagacgccgagatgc

SEQ ID NO: 1698 - RNA, 25 nt, Homo sapiens
  source 1..25: mol_type = unassigned RNA
gttctaaagtccccacgcacccacc

SEQ ID NO: 1699 - RNA, 25 nt, Homo sapiens
  source 1..25: mol_type = unassigned RNA
ctcagcacagcgaacatgcaaattc

SEQ ID NO: 1700 - RNA, 25 nt, Homo sapiens
  source 1..25: mol_type = unassigned RNA
gcacagcgaacatgcaaattctgga

SEQ ID NO: 1701 - RNA, 25 nt, Homo sapiens
  source 1..25: mol_type = unassigned RNA
aacatgcaaattctggaaggttctc

SEQ ID NO: 1702 - RNA, 25 nt, Homo sapiens
  source 1..25: mol_type = unassigned RNA
gtctttatttgctctctcaacttct

SEQ ID NO: 1703 - RNA, 25 nt, Homo sapiens
  source 1..25: mol_type = unassigned RNA
tatttgagaacacaaatttatattc

SEQ ID NO: 1704 - RNA, 25 nt, Homo sapiens
  source 1..25: mol_type = unassigned RNA
ttatattcaggttcttaacttcatt

SEQ ID NO: 1705 - RNA, 25 nt, Homo sapiens
  source 1..25: mol_type = unassigned RNA
tatattcaggttcttaacttcatta

SEQ ID NO: 1706 - RNA, 25 nt, Homo sapiens
  source 1..25: mol_type = unassigned RNA
gtgcaccatgaatttgagacagaga

SEQ ID NO: 1707 - RNA, 25 nt, Homo sapiens
  source 1..25: mol_type = unassigned RNA
atggagacatccagccccacctctc

SEQ ID NO: 1708 - RNA, 25 nt, Homo sapiens
  source 1..25: mol_type = unassigned RNA
acatccagccccacctctctggaac

SEQ ID NO: 1709 - RNA, 25 nt, Homo sapiens
  source 1..25: mol_type = unassigned RNA
acctctctggaacaggaaagatgat

SEQ ID NO: 1710 - RNA, 25 nt, Homo sapiens
  source 1..25: mol_type = unassigned RNA
cctctctggaacaggaaagatgatc

SEQ ID NO: 1711 - RNA, 25 nt, Homo sapiens
  source 1..25: mol_type = unassigned RNA
ctctctggaacaggaaagatgatcg

SEQ ID NO: 1712 - RNA, 25 nt, Homo sapiens
  source 1..25: mol_type = unassigned RNA
tctggaacaggaaagatgatcgggg

SEQ ID NO: 1713 - RNA, 25 nt, Homo sapiens
  source 1..25: mol_type = unassigned RNA
ctggaacaggaaagatgatcgggga

SEQ ID NO: 1714 - RNA, 25 nt, Homo sapiens
  source 1..25: mol_type = unassigned RNA
ggaaagatgatcggggagggaacac

SEQ ID NO: 1715 - RNA, 25 nt, Homo sapiens
  source 1..25: mol_type = unassigned RNA
atcggggagggaacacaggtcagtg

SEQ ID NO: 1716 - RNA, 25 nt, Homo sapiens
  source 1..25: mol_type = unassigned RNA
tcggggagggaacacaggtcagtgt

SEQ ID NO: 1717 - RNA, 25 nt, Homo sapiens
  source 1..25: mol_type = unassigned RNA
cggggagggaacacaggtcagtgtg

SEQ ID NO: 1718 - RNA, 25 nt, Homo sapiens
  source 1..25: mol_type = unassigned RNA
agggaacacaggtcagtgtggggac

SEQ ID NO: 1719 - RNA, 25 nt, Homo sapiens
  source 1..25: mol_type = unassigned RNA
gggaacacaggtcagtgtggggaca

SEQ ID NO: 1720 - RNA, 25 nt, Homo sapiens
  source 1..25: mol_type = unassigned RNA
ggaacacaggtcagtgtggggacag

SEQ ID NO: 1721 - RNA, 25 nt, Homo sapiens
  source 1..25: mol_type = unassigned RNA
caggtcagtgtggggacaggggtca

SEQ ID NO: 1722 - RNA, 25 nt, Homo sapiens
  source 1..25: mol_type = unassigned RNA
gtcagtgtggggacaggggtcacgg

SEQ ID NO: 1723 - RNA, 25 nt, Homo sapiens
  source 1..25: mol_type = unassigned RNA
gtggggacaggggtcacggtggaca

SEQ ID NO: 1724 - RNA, 25 nt, Homo sapiens
  source 1..25: mol_type = unassigned RNA
tggggacaggggtcacggtggacac

SEQ ID NO: 1725 - RNA, 25 nt, Homo sapiens
  source 1..25: mol_type = unassigned RNA
ggggacaggggtcacggtggacacg

SEQ ID NO: 1726 - RNA, 25 nt, Homo sapiens
  source 1..25: mol_type = unassigned RNA
gggacaggggtcacggtggacacgg

SEQ ID NO: 1727 - RNA, 25 nt, Homo sapiens
  source 1..25: mol_type = unassigned RNA
acaggggtcacggtggacacggggg

SEQ ID NO: 1728 - RNA, 25 nt, Homo sapiens
  source 1..25: mol_type = unassigned RNA
caggggtcacggtggacacgggggt

SEQ ID NO: 1729 - RNA, 25 nt, Homo sapiens
  source 1..25: mol_type = unassigned RNA
ctccacctcctcacattatgctaac

SEQ ID NO: 1730 - RNA, 25 nt, Homo sapiens
  source 1..25: mol_type = unassigned RNA
tgctaacaggaacgcagacacattc

SEQ ID NO: 1731 - RNA, 25 nt, Homo sapiens
  source 1..25: mol_type = unassigned RNA
gtgcctttgcagaaagagatgccag

SEQ ID NO: 1732 - RNA, 25 nt, Homo sapiens
  source 1..25: mol_type = unassigned RNA
atgccagaggctcttgaagtcacaa

SEQ ID NO: 1733 - RNA, 25 nt, Homo sapiens
  source 1..25: mol_type = unassigned RNA
agaggctcttgaagtcacaaaggag

SEQ ID NO: 1734 - RNA, 25 nt, Homo sapiens
  source 1..25: mol_type = unassigned RNA
gaaatcctgcatctcagtcccacac

SEQ ID NO: 1735 - RNA, 25 nt, Homo sapiens
  source 1..25: mol_type = unassigned RNA
tcagtcccacacaggcagctgtctc

SEQ ID NO: 1736 - RNA, 25 nt, Homo sapiens
  source 1..25: mol_type = unassigned RNA
tcaaatatttgctatgaagcgttga

SEQ ID NO: 1737 - RNA, 25 nt, Homo sapiens
  source 1..25: mol_type = unassigned RNA
tgtctccatctctgtctcaaattca

SEQ ID NO: 1738 - RNA, 25 nt, Homo sapiens
  source 1..25: mol_type = unassigned RNA
ctttcctgttccagagaggtggggc

SEQ ID NO: 1739 - RNA, 25 nt, Homo sapiens
  source 1..25: mol_type = unassigned RNA
tcatctttcctgttccagagaggtg

SEQ ID NO: 1740 - RNA, 25 nt, Homo sapiens
  source 1..25: mol_type = unassigned RNA
atcatctttcctgttccagagaggt

SEQ ID NO: 1741 - RNA, 25 nt, Homo sapiens
  source 1..25: mol_type = unassigned RNA
gatcatctttcctgttccagagagg

SEQ ID NO: 1742 - RNA, 25 nt, Homo sapiens
  source 1..25: mol_type = unassigned RNA
cccgatcatctttcctgttccagag

SEQ ID NO: 1743 - RNA, 25 nt, Homo sapiens
  source 1..25: mol_type = unassigned RNA
ttcctgttagcataatgtgaggagg

SEQ ID NO: 1744 - RNA, 25 nt, Homo sapiens
  source 1..25: mol_type = unassigned RNA
gcgttcctgttagcataatgtgagg

SEQ ID NO: 1745 - RNA, 25 nt, Homo sapiens
  source 1..25: mol_type = unassigned RNA
tctgcgttcctgttagcataatgtg

SEQ ID NO: 1746 - RNA, 25 nt, Homo sapiens
  source 1..25: mol_type = unassigned RNA
gagcctctggcatctctttctgcaa

SEQ ID NO: 1747 - RNA, 25 nt, Homo sapiens
  source 1..25: mol_type = unassigned RNA
tctcctttgtgacttcaagagcctc

SEQ ID NO: 1748 - RNA, 25 nt, Homo sapiens
  source 1..25: mol_type = unassigned RNA
agctgcctgtgtgggactgagatgc

SEQ ID NO: 1749 - RNA, 25 nt, Homo sapiens
  source 1..25: mol_type = unassigned RNA
tgtagcctgagacagctgcctgtgt

SEQ ID NO: 1750 - RNA, 25 nt, Homo sapiens
  source 1..25: mol_type = unassigned RNA
ctgtagcctgagacagctgcctgtg

SEQ ID NO: 1751 - RNA, 25 nt, Homo sapiens
  source 1..25: mol_type = unassigned RNA
agtgatgagagactcatcagagccc

SEQ ID NO: 1752 - RNA, 25 nt, Homo sapiens
  source 1..25: mol_type = unassigned RNA
gtgatgagagactcatcagagccct

SEQ ID NO: 1753 - RNA, 25 nt, Homo sapiens
  source 1..25: mol_type = unassigned RNA
cagagccctgggcactgttgctgcc

SEQ ID NO: 1754 - RNA, 25 nt, Homo sapiens
  source 1..25: mol_type = unassigned RNA
agagccctgggcactgttgctgcct

SEQ ID NO: 1755 - RNA, 25 nt, Homo sapiens
  source 1..25: mol_type = unassigned RNA
gagccctgggcactgttgctgcctg

SEQ ID NO: 1756 - RNA, 25 nt, Homo sapiens
  source 1..25: mol_type = unassigned RNA
aaggtgagattctggggagctgaag

SEQ ID NO: 1757 - RNA, 25 nt, Homo sapiens
  source 1..25: mol_type = unassigned RNA
catcacttgtaaaggtgagattctg

SEQ ID NO: 1758 - RNA, 25 nt, Homo sapiens
  source 1..25: mol_type = unassigned RNA
tcatcacttgtaaaggtgagattct

SEQ ID NO: 1759 - RNA, 25 nt, Homo sapiens
  source 1..25: mol_type = unassigned RNA
ctcatcacttgtaaaggtgagattc

SEQ ID NO: 1760 - RNA, 25 nt, Homo sapiens
  source 1..25: mol_type = unassigned RNA
ctgatgagtctctcatcacttgtaa

SEQ ID NO: 1761 - RNA, 25 nt, Homo sapiens
  source 1..25: mol_type = unassigned RNA
ctaccccaggcagcaacagtgccca

SEQ ID NO: 1762 - RNA, 25 nt, Homo sapiens
  source 1..25: mol_type = unassigned RNA
tctaccccaggcagcaacagtgccc

SEQ ID NO: 1763 - RNA, 25 nt, Homo sapiens
  source 1..25: mol_type = unassigned RNA
gagcagctccctccttttccacctg

SEQ ID NO: 1764 - RNA, 25 nt, Homo sapiens
  source 1..25: mol_type = unassigned RNA
agcagctccctccttttccacctgt

SEQ ID NO: 1765 - RNA, 25 nt, Homo sapiens
  source 1..25: mol_type = unassigned RNA
cgtgtaagtgatggcggcgggcgtg

SEQ ID NO: 1766 - RNA, 25 nt, Homo sapiens
  source 1..25: mol_type = unassigned RNA
caggctgcgtgtaagtgatggcggc

SEQ ID NO: 1767 - RNA, 25 nt, Homo sapiens
  source 1..25: mol_type = unassigned RNA
tcaggctgcgtgtaagtgatggcgg

SEQ ID NO: 1768 - RNA, 25 nt, Homo sapiens
  source 1..25: mol_type = unassigned RNA
ctctcaggctgcgtgtaagtgatgg

SEQ ID NO: 1769 - RNA, 25 nt, Homo sapiens
  source 1..25: mol_type = unassigned RNA
ctgctctcaggctgcgtgtaagtga

SEQ ID NO: 1770 - RNA, 25 nt, Homo sapiens
  source 1..25: mol_type = unassigned RNA
ggtggaaaaggagggagctgctctc

SEQ ID NO: 1771 - RNA, 25 nt, Homo sapiens
  source 1..25: mol_type = unassigned RNA
ttttcttcccacaggtggaaaagga

SEQ ID NO: 1772 - RNA, 25 nt, Homo sapiens
  source 1..25: mol_type = unassigned RNA
attttcttcccacaggtggaaaagg

SEQ ID NO: 1773 - RNA, 25 nt, Homo sapiens
  source 1..25: mol_type = unassigned RNA
ggcattttcttcccacaggtggaaa

SEQ ID NO: 1774 - RNA, 25 nt, Homo sapiens
  source 1..25: mol_type = unassigned RNA
tcatagggcattttcttcccacagg

SEQ ID NO: 1775 - RNA, 25 nt, Homo sapiens
  source 1..25: mol_type = unassigned RNA
gagctcttcctcctacacatcatag

SEQ ID NO: 1776 - RNA, 25 nt, Homo sapiens
  source 1..25: mol_type = unassigned RNA
catcatagcggtgaccacagctcca

SEQ ID NO: 1777 - RNA, 25 nt, Homo sapiens
  source 1..25: mol_type = unassigned RNA
ggtgaccacagctccaaggacagct

SEQ ID NO: 1778 - RNA, 25 nt, Homo sapiens
  source 1..25: mol_type = unassigned RNA
agctccaaggacagctaggacaacc

SEQ ID NO: 1779 - RNA, 25 nt, Homo sapiens
  source 1..25: mol_type = unassigned RNA
gacagctaggacaaccaggacagcc

SEQ ID NO: 1780 - RNA, 25 nt, Homo sapiens
  source 1..25: mol_type = unassigned RNA
gccaggccagcaacgatgcccatga

SEQ ID NO: 1781 - RNA, 25 nt, Homo sapiens
  source 1..25: mol_type = unassigned RNA
ccaggccagcaacgatgcccatgat

SEQ ID NO: 1782 - RNA, 25 nt, Homo sapiens
  source 1..25: mol_type = unassigned RNA
caggccagcaacgatgcccatgatg

SEQ ID NO: 1783 - RNA, 25 nt, Homo sapiens
  source 1..25: mol_type = unassigned RNA
ccagcaacgatgcccatgatgggga

SEQ ID NO: 1784 - RNA, 25 nt, Homo sapiens
  source 1..25: mol_type = unassigned RNA
gcaacgatgcccatgatggggatgg

SEQ ID NO: 1785 - RNA, 25 nt, Homo sapiens
  source 1..25: mol_type = unassigned RNA
caacgatgcccatgatggggatggt

SEQ ID NO: 1786 - RNA, 25 nt, Homo sapiens
  source 1..25: mol_type = unassigned RNA
gatgcccatgatggggatggtgggc

SEQ ID NO: 1787 - RNA, 25 nt, Homo sapiens
  source 1..25: mol_type = unassigned RNA
atgcccatgatggggatggtgggct

SEQ ID NO: 1788 - RNA, 25 nt, Homo sapiens
  source 1..25: mol_type = unassigned RNA
tgatggggatggtgggctgggaaga

SEQ ID NO: 1789 - RNA, 25 nt, Homo sapiens
  source 1..25: mol_type = unassigned RNA
ggatggtgggctgggaagatggctc

SEQ ID NO: 1790 - RNA, 25 nt, Homo sapiens
  source 1..25: mol_type = unassigned RNA
gatggtgggctgggaagatggctct

SEQ ID NO: 1791 - RNA, 25 nt, Homo sapiens
  source 1..25: mol_type = unassigned RNA
tgggctgggaagatggctctgggaa

SEQ ID NO: 1792 - RNA, 25 nt, Homo sapiens
  source 1..25: mol_type = unassigned RNA
gctgggaagatggctctgggaaagg

SEQ ID NO: 1793 - RNA, 25 nt, Homo sapiens
  source 1..25: mol_type = unassigned RNA
aagatggctctgggaaaggaggaga

SEQ ID NO: 1794 - RNA, 25 nt, Homo sapiens
  source 1..25: mol_type = unassigned RNA
ggctctgggaaaggaggagaaggtg

SEQ ID NO: 1795 - RNA, 25 nt, Homo sapiens
  source 1..25: mol_type = unassigned RNA
gctctgggaaaggaggagaaggtga

SEQ ID NO: 1796 - RNA, 25 nt, Homo sapiens
  source 1..25: mol_type = unassigned RNA
tcaggtagggaaggggtgaagagcg

SEQ ID NO: 1797 - RNA, 25 nt, Homo sapiens
  source 1..25: mol_type = unassigned RNA
ctcaggtagggaaggggtgaagagc

SEQ ID NO: 1798 - RNA, 25 nt, Homo sapiens
  source 1..25: mol_type = unassigned RNA
gctcaggtagggaaggggtgaagag

SEQ ID NO: 1799 - RNA, 25 nt, Homo sapiens
  source 1..25: mol_type = unassigned RNA
aggaggaagagctcaggtagggaag

SEQ ID NO: 1800 - RNA, 25 nt, Homo sapiens
  source 1..25: mol_type = unassigned RNA
taggaggaagagctcaggtagggaa

SEQ ID NO: 1801 - RNA, 25 nt, Homo sapiens
  source 1..25: mol_type = unassigned RNA
gtaggaggaagagctcaggtaggga

SEQ ID NO: 1802 - RNA, 25 nt, Homo sapiens
  source 1..25: mol_type = unassigned RNA
atgtgtaggaggaagagctcaggta

SEQ ID NO: 1803 - RNA, 25 nt, Homo sapiens
  source 1..25: mol_type = unassigned RNA
gatgtgtaggaggaagagctcaggt

SEQ ID NO: 1804 - RNA, 25 nt, Homo sapiens
  source 1..25: mol_type = unassigned RNA
ctatgatgtgtaggaggaagagctc

SEQ ID NO: 1805 - RNA, 25 nt, Homo sapiens
  source 1..25: mol_type = unassigned RNA
tgtggtcaccgctatgatgtgtagg

SEQ ID NO: 1806 - RNA, 25 nt, Homo sapiens
  source 1..25: mol_type = unassigned RNA
agctgtggtcaccgctatgatgtgt

SEQ ID NO: 1807 - RNA, 25 nt, Homo sapiens
  source 1..25: mol_type = unassigned RNA
gttgtcctagctgtccttggagctg

SEQ ID NO: 1808 - RNA, 25 nt, Homo sapiens
  source 1..25: mol_type = unassigned RNA
ctgtcctggttgtcctagctgtcct

SEQ ID NO: 1809 - RNA, 25 nt, Homo sapiens
  source 1..25: mol_type = unassigned RNA
ggcatcgttgctggcctggctgtcc

SEQ ID NO: 1810 - RNA, 25 nt, Homo sapiens
  source 1..25: mol_type = unassigned RNA
cccatcatgggcatcgttgctggcc

SEQ ID NO: 1811 - RNA, 25 nt, Homo sapiens
  source 1..25: mol_type = unassigned RNA
ccatccccatcatgggcatcgttgc

SEQ ID NO: 1812 - RNA, 25 nt, Homo sapiens
  source 1..25: mol_type = unassigned RNA
cttcccagcccaccatccccatcat

SEQ ID NO: 1813 - RNA, 25 nt, Homo sapiens
  source 1..25: mol_type = unassigned RNA
tcttcccagcccaccatccccatca

SEQ ID NO: 1814 - RNA, 25 nt, Homo sapiens
  source 1..25: mol_type = unassigned RNA
cccattcccctccttaccccagctc

SEQ ID NO: 1815 - RNA, 25 nt, Homo sapiens
  source 1..25: mol_type = unassigned RNA
ccattcccctccttaccccagctca

SEQ ID NO: 1816 - RNA, 25 nt, Homo sapiens
  source 1..25: mol_type = unassigned RNA
cccctccttaccccagctcagggtg

SEQ ID NO: 1817 - RNA, 25 nt, Homo sapiens
  source 1..25: mol_type = unassigned RNA
ccctccttaccccagctcagggtga

SEQ ID NO: 1818 - RNA, 25 nt, Homo sapiens
  source 1..25: mol_type = unassigned RNA
cctccttaccccagctcagggtgag

SEQ ID NO: 1819 - RNA, 25 nt, Homo sapiens
  source 1..25: mol_type = unassigned RNA
ctcttgcagcccctcgtgctgcata

SEQ ID NO: 1820 - RNA, 25 nt, Homo sapiens
  source 1..25: mol_type = unassigned RNA
acgtgtatctctgctcttgtccaga

SEQ ID NO: 1821 - RNA, 25 nt, Homo sapiens
  source 1..25: mol_type = unassigned RNA
aggcaccaccacagctgcccacttc

SEQ ID NO: 1822 - RNA, 25 nt, Homo sapiens
  source 1..25: mol_type = unassigned RNA
accaccacagctgcccacttctgga

SEQ ID NO: 1823 - RNA, 25 nt, Homo sapiens
  source 1..25: mol_type = unassigned RNA
acttctggaaggttccatctcctgc

SEQ ID NO: 1824 - RNA, 25 nt, Homo sapiens
  source 1..25: mol_type = unassigned RNA
tggaaggttccatctcctgctggcc

SEQ ID NO: 1825 - RNA, 25 nt, Homo sapiens
  source 1..25: mol_type = unassigned RNA
cctgctggcctggtctccacaagct

SEQ ID NO: 1826 - RNA, 25 nt, Homo sapiens
  source 1..25: mol_type = unassigned RNA
cctggtctccacaagctcggtgtcc

SEQ ID NO: 1827 - RNA, 25 nt, Homo sapiens
  source 1..25: mol_type = unassigned RNA
ctggtctccacaagctcggtgtcct

SEQ ID NO: 1828 - RNA, 25 nt, Homo sapiens
  source 1..25: mol_type = unassigned RNA
ctccacaagctcggtgtcctgggtc

SEQ ID NO: 1829 - RNA, 25 nt, Homo sapiens
  source 1..25: mol_type = unassigned RNA
gtctggtcctccccatcccgctgcc

SEQ ID NO: 1830 - RNA, 25 nt, Homo sapiens
  source 1..25: mol_type = unassigned RNA
gctgccaggtcagtgtgatctccgc

SEQ ID NO: 1831 - RNA, 25 nt, Homo sapiens
  source 1..25: mol_type = unassigned RNA
ctgccaggtcagtgtgatctccgca

SEQ ID NO: 1832 - RNA, 25 nt, Homo sapiens
  source 1..25: mol_type = unassigned RNA
tgtgatctccgcagggtagaagccc

SEQ ID NO: 1833 - RNA, 25 nt, Homo sapiens
  source 1..25: mol_type = unassigned RNA
gtgatctccgcagggtagaagccca

SEQ ID NO: 1834 - RNA, 25 nt, Homo sapiens
  source 1..25: mol_type = unassigned RNA
gtagaagcccagggcccagcacctc

SEQ ID NO: 1835 - RNA, 25 nt, Homo sapiens
  source 1..25: mol_type = unassigned RNA
tagaagcccagggcccagcacctca

SEQ ID NO: 1836 - RNA, 25 nt, Homo sapiens
  source 1..25: mol_type = unassigned RNA
aagcccagggcccagcacctcaggg

SEQ ID NO: 1837 - RNA, 25 nt, Homo sapiens
  source 1..25: mol_type = unassigned RNA
ggcccagcacctcagggtggcctca

SEQ ID NO: 1838 - RNA, 25 nt, Homo sapiens
  source 1..25: mol_type = unassigned RNA
cctcagggtggcctcatggtcagag

SEQ ID NO: 1839 - RNA, 25 nt, Homo sapiens
  source 1..25: mol_type = unassigned RNA
ctcagggtggcctcatggtcagaga

SEQ ID NO: 1840 - RNA, 25 nt, Homo sapiens
  source 1..25: mol_type = unassigned RNA
tcagggtggcctcatggtcagagag

SEQ ID NO: 1841 - RNA, 25 nt, Homo sapiens
  source 1..25: mol_type = unassigned RNA
cagggtggcctcatggtcagagagg

SEQ ID NO: 1842 - RNA, 25 nt, Homo sapiens
  source 1..25: mol_type = unassigned RNA
ggtggcctcatggtcagagaggggg

SEQ ID NO: 1843 - RNA, 25 nt, Homo sapiens
  source 1..25: mol_type = unassigned RNA
ggcctcatggtcagagagggggtgg

SEQ ID NO: 1844 - RNA, 25 nt, Homo sapiens
  source 1..25: mol_type = unassigned RNA
gcctcatggtcagagagggggtggt

SEQ ID NO: 1845 - RNA, 25 nt, Homo sapiens
  source 1..25: mol_type = unassigned RNA
gggggtggtgggtcacgtgtgtctt

SEQ ID NO: 1846 - RNA, 25 nt, Homo sapiens
  source 1..25: mol_type = unassigned RNA
ggggtggtgggtcacgtgtgtcttt

SEQ ID NO: 1847 - RNA, 25 nt, Homo sapiens
  source 1..25: mol_type = unassigned RNA
gggtggtgggtcacgtgtgtctttg

SEQ ID NO: 1848 - RNA, 25 nt, Homo sapiens
  source 1..25: mol_type = unassigned RNA
ggtggtgggtcacgtgtgtctttgg

SEQ ID NO: 1849 - RNA, 25 nt, Homo sapiens
  source 1..25: mol_type = unassigned RNA
tcacgtgtgtctttgggggttctga

SEQ ID NO: 1850 - RNA, 25 nt, Homo sapiens
  source 1..25: mol_type = unassigned RNA
cacgtgtgtctttgggggttctgac

SEQ ID NO: 1851 - RNA, 25 nt, Homo sapiens
  source 1..25: mol_type = unassigned RNA
gagctggggtaaggaggggaatggg

SEQ ID NO: 1852 - RNA, 25 nt, Homo sapiens
  source 1..25: mol_type = unassigned RNA
tgagctggggtaaggaggggaatgg

SEQ ID NO: 1853 - RNA, 25 nt, Homo sapiens
  source 1..25: mol_type = unassigned RNA
ctgagctggggtaaggaggggaatg

SEQ ID NO: 1854 - RNA, 25 nt, Homo sapiens
  source 1..25: mol_type = unassigned RNA
cctgagctggggtaaggaggggaat

SEQ ID NO: 1855 - RNA, 25 nt, Homo sapiens
  source 1..25: mol_type = unassigned RNA
ccctgagctggggtaaggaggggaa

SEQ ID NO: 1856 - RNA, 25 nt, Homo sapiens
  source 1..25: mol_type = unassigned RNA
cctcaccctgagctggggtaaggag

SEQ ID NO: 1857 - RNA, 25 nt, Homo sapiens
  source 1..25: mol_type = unassigned RNA
ccctcaccctgagctggggtaagga

SEQ ID NO: 1858 - RNA, 25 nt, Homo sapiens
  source 1..25: mol_type = unassigned RNA
cccctcaccctgagctggggtaagg

SEQ ID NO: 1859 - RNA, 25 nt, Homo sapiens
  source 1..25: mol_type = unassigned RNA
gagcccctcaccctgagctggggta

SEQ ID NO: 1860 - RNA, 25 nt, Homo sapiens
  source 1..25: mol_type = unassigned RNA
tgcaagagcccctcaccctgagctg

SEQ ID NO: 1861 - RNA, 25 nt, Homo sapiens
  source 1..25: mol_type = unassigned RNA
ctgcaagagcccctcaccctgagct

SEQ ID NO: 1862 - RNA, 25 nt, Homo sapiens
  source 1..25: mol_type = unassigned RNA
gctgcaagagcccctcaccctgagc

SEQ ID NO: 1863 - RNA, 25 nt, Homo sapiens
  source 1..25: mol_type = unassigned RNA
atacacgtgccatatgcagcacgag

SEQ ID NO: 1864 - RNA, 25 nt, Homo sapiens
  source 1..25: mol_type = unassigned RNA
gatacacgtgccatatgcagcacga

SEQ ID NO: 1865 - RNA, 25 nt, Homo sapiens
  source 1..25: mol_type = unassigned RNA
agatacacgtgccatatgcagcacg

SEQ ID NO: 1866 - RNA, 25 nt, Homo sapiens
  source 1..25: mol_type = unassigned RNA
agtgggcagctgtggtggtgccttc

SEQ ID NO: 1867 - RNA, 25 nt, Homo sapiens
  source 1..25: mol_type = unassigned RNA
accttccagaagtgggcagctgtgg

SEQ ID NO: 1868 - RNA, 25 nt, Homo sapiens
  source 1..25: mol_type = unassigned RNA
ggaaccttccagaagtgggcagctg

SEQ ID NO: 1869 - RNA, 25 nt, Homo sapiens
  source 1..25: mol_type = unassigned RNA
gcaggagatggaaccttccagaagt

SEQ ID NO: 1870 - RNA, 25 nt, Homo sapiens
  source 1..25: mol_type = unassigned RNA
agcaggagatggaaccttccagaag

SEQ ID NO: 1871 - RNA, 25 nt, Homo sapiens
  source 1..25: mol_type = unassigned RNA
ttgtggagaccaggccagcaggaga

SEQ ID NO: 1872 - RNA, 25 nt, Homo sapiens
  source 1..25: mol_type = unassigned RNA
ccgagcttgtggagaccaggccagc

SEQ ID NO: 1873 - RNA, 25 nt, Homo sapiens
  source 1..25: mol_type = unassigned RNA
ccaggacaccgagcttgtggagacc

SEQ ID NO: 1874 - RNA, 25 nt, Homo sapiens
  source 1..25: mol_type = unassigned RNA
gaccagacccaggacaccgagcttg

SEQ ID NO: 1875 - RNA, 25 nt, Homo sapiens
  source 1..25: mol_type = unassigned RNA
cagcgggatggggaggaccagaccc

SEQ ID NO: 1876 - RNA, 25 nt, Homo sapiens
  source 1..25: mol_type = unassigned RNA
acactgacctggcagcgggatgggg

SEQ ID NO: 1877 - RNA, 25 nt, Homo sapiens
  source 1..25: mol_type = unassigned RNA
atcacactgacctggcagcgggatg

SEQ ID NO: 1878 - RNA, 25 nt, Homo sapiens
  source 1..25: mol_type = unassigned RNA
gatcacactgacctggcagcgggat

SEQ ID NO: 1879 - RNA, 25 nt, Homo sapiens
  source 1..25: mol_type = unassigned RNA
agatcacactgacctggcagcggga

SEQ ID NO: 1880 - RNA, 25 nt, Homo sapiens
  source 1..25: mol_type = unassigned RNA
gcggagatcacactgacctggcagc

SEQ ID NO: 1881 - RNA, 25 nt, Homo sapiens
  source 1..25: mol_type = unassigned RNA
tgcggagatcacactgacctggcag

SEQ ID NO: 1882 - RNA, 25 nt, Homo sapiens
  source 1..25: mol_type = unassigned RNA
ctaccctgcggagatcacactgacc

SEQ ID NO: 1883 - RNA, 25 nt, Homo sapiens
  source 1..25: mol_type = unassigned RNA
tgctgggccctgggcttctaccctg

SEQ ID NO: 1884 - RNA, 25 nt, Homo sapiens
  source 1..25: mol_type = unassigned RNA
aggccaccctgaggtgctgggccct

SEQ ID NO: 1885 - RNA, 25 nt, Homo sapiens
  source 1..25: mol_type = unassigned RNA
gaggccaccctgaggtgctgggccc

SEQ ID NO: 1886 - RNA, 25 nt, Homo sapiens
  source 1..25: mol_type = unassigned RNA
gaccatgaggccaccctgaggtgct

SEQ ID NO: 1887 - RNA, 25 nt, Homo sapiens
  source 1..25: mol_type = unassigned RNA
tgaccatgaggccaccctgaggtgc

SEQ ID NO: 1888 - RNA, 25 nt, Homo sapiens
  source 1..25: mol_type = unassigned RNA
cctctctgaccatgaggccaccctg

SEQ ID NO: 1889 - RNA, 25 nt, Homo sapiens
  source 1..25: mol_type = unassigned RNA
acccaccaccccctctctgaccatg

SEQ ID NO: 1890 - RNA, 25 nt, Homo sapiens
  source 1..25: mol_type = unassigned RNA
ctgcagcgtctccttcccgttctcc

SEQ ID NO: 1891 - RNA, 25 nt, Homo sapiens
  source 1..25: mol_type = unassigned RNA
ctccttcccgttctccaggtatctg

SEQ ID NO: 1892 - RNA, 25 nt, Homo sapiens
  source 1..25: mol_type = unassigned RNA
gagccactccacgcacgtgccctcc

SEQ ID NO: 1893 - RNA, 25 nt, Homo sapiens
  source 1..25: mol_type = unassigned RNA
cactccacgcacgtgccctccaggt

SEQ ID NO: 1894 - RNA, 25 nt, Homo sapiens
  source 1..25: mol_type = unassigned RNA
gtaggctctcagctgctccgccgca

SEQ ID NO: 1895 - RNA, 25 nt, Homo sapiens
  source 1..25: mol_type = unassigned RNA
taggctctcagctgctccgccgcac

SEQ ID NO: 1896 - RNA, 25 nt, Homo sapiens
  source 1..25: mol_type = unassigned RNA
cgcacgggccgcctccaacttgcgc

SEQ ID NO: 1897 - RNA, 25 nt, Homo sapiens
  source 1..25: mol_type = unassigned RNA
gcacgggccgcctccaacttgcgct

SEQ ID NO: 1898 - RNA, 25 nt, Homo sapiens
  source 1..25: mol_type = unassigned RNA
aacttgcgctgggtgatctgagccg

SEQ ID NO: 1899 - RNA, 25 nt, Homo sapiens
  source 1..25: mol_type = unassigned RNA
tgggtgatctgagccgcggtgtccg

SEQ ID NO: 1900 - RNA, 25 nt, Homo sapiens
  source 1..25: mol_type = unassigned RNA
gtgatctgagccgcggtgtccgcgg

SEQ ID NO: 1901 - RNA, 25 nt, Homo sapiens
  source 1..25: mol_type = unassigned RNA
tgagccgcggtgtccgcggcggtcc

SEQ ID NO: 1902 - RNA, 25 nt, Homo sapiens
  source 1..25: mol_type = unassigned RNA
ggtgtccgcggcggtccaggagcgc

SEQ ID NO: 1903 - RNA, 25 nt, Homo sapiens
  source 1..25: mol_type = unassigned RNA
ggtccaggagcgcaggtcctcgttc

SEQ ID NO: 1904 - RNA, 25 nt, Homo sapiens
  source 1..25: mol_type = unassigned RNA
gtccaggagcgcaggtcctcgttca

SEQ ID NO: 1905 - RNA, 25 nt, Homo sapiens
  source 1..25: mol_type = unassigned RNA
agggcgatgtaatccttgccgtcgt

SEQ ID NO: 1906 - RNA, 25 nt, Homo sapiens
  source 1..25: mol_type = unassigned RNA
gcgatgtaatccttgccgtcgtagg

SEQ ID NO: 1907 - RNA, 25 nt, Homo sapiens
  source 1..25: mol_type = unassigned RNA
gtaatccttgccgtcgtaggcggac

SEQ ID NO: 1908 - RNA, 25 nt, Homo sapiens
  source 1..25: mol_type = unassigned RNA
gtcgtaggcggactggtcatacccg

SEQ ID NO: 1909 - RNA, 25 nt, Homo sapiens
  source 1..25: mol_type = unassigned RNA
gtaggcggactggtcatacccgcgg

SEQ ID NO: 1910 - RNA, 25 nt, Homo sapiens
  source 1..25: mol_type = unassigned RNA
ggcggactggtcatacccgcggagg

SEQ ID NO: 1911 - RNA, 25 nt, Homo sapiens
  source 1..25: mol_type = unassigned RNA
tcatacccgcggaggaggcgcccgt

SEQ ID NO: 1912 - RNA, 25 nt, Homo sapiens
  source 1..25: mol_type = unassigned RNA
catacccgcggaggaggcgcccgtc

SEQ ID NO: 1913 - RNA, 25 nt, Homo sapiens
  source 1..25: mol_type = unassigned RNA
gcggaggaggcgcccgtcgggcccc

SEQ ID NO: 1914 - RNA, 25 nt, Homo sapiens
  source 1..25: mol_type = unassigned RNA
ccccaggtcgcagccagacatcctc

SEQ ID NO: 1915 - RNA, 25 nt, Homo sapiens
  source 1..25: mol_type = unassigned RNA
caggtcgcagccagacatcctctgg

SEQ ID NO: 1916 - RNA, 25 nt, Homo sapiens
  source 1..25: mol_type = unassigned RNA
aggtcgcagccagacatcctctgga

SEQ ID NO: 1917 - RNA, 25 nt, Homo sapiens
  source 1..25: mol_type = unassigned RNA
acatcctctggagggtgtgagaccc

SEQ ID NO: 1918 - RNA, 25 nt, Homo sapiens
  source 1..25: mol_type = unassigned RNA
gtgtgagaccctggccccgcccccg

SEQ ID NO: 1919 - RNA, 25 nt, Homo sapiens
  source 1..25: mol_type = unassigned RNA
cagcgcgcaggtaccaggggcagtg

SEQ ID NO: 1920 - RNA, 25 nt, Homo sapiens
  source 1..25: mol_type = unassigned RNA
gcagcgcgcaggtaccaggggcagt

SEQ ID NO: 1921 - RNA, 25 nt, Homo sapiens
  source 1..25: mol_type = unassigned RNA
tgcagcgcgcaggtaccaggggcag

SEQ ID NO: 1922 - RNA, 25 nt, Homo sapiens
  source 1..25: mol_type = unassigned RNA
agacgctgcagcgcgcaggtaccag

SEQ ID NO: 1923 - RNA, 25 nt, Homo sapiens
  source 1..25: mol_type = unassigned RNA
gagacgctgcagcgcgcaggtacca

SEQ ID NO: 1924 - RNA, 25 nt, Homo sapiens
  source 1..25: mol_type = unassigned RNA
ggagacgctgcagcgcgcaggtacc

SEQ ID NO: 1925 - RNA, 25 nt, Homo sapiens
  source 1..25: mol_type = unassigned RNA
acgggaaggagacgctgcagcgcgc

SEQ ID NO: 1926 - RNA, 25 nt, Homo sapiens
  source 1..25: mol_type = unassigned RNA
ctccgcagatacctggagaacggga

SEQ ID NO: 1927 - RNA, 25 nt, Homo sapiens
  source 1..25: mol_type = unassigned RNA
gtggctccgcagatacctggagaac

SEQ ID NO: 1928 - RNA, 25 nt, Homo sapiens
  source 1..25: mol_type = unassigned RNA
agtggctccgcagatacctggagaa

SEQ ID NO: 1929 - RNA, 25 nt, Homo sapiens
  source 1..25: mol_type = unassigned RNA
tgcgtggagtggctccgcagatacc

SEQ ID NO: 1930 - RNA, 25 nt, Homo sapiens
  source 1..25: mol_type = unassigned RNA
ctacctggagggcacgtgcgtggag

SEQ ID NO: 1931 - RNA, 25 nt, Homo sapiens
  source 1..25: mol_type = unassigned RNA
agagcctacctggagggcacgtgcg

SEQ ID NO: 1932 - RNA, 25 nt, Homo sapiens
  source 1..25: mol_type = unassigned RNA
cggagcagctgagagcctacctgga

SEQ ID NO: 1933 - RNA, 25 nt, Homo sapiens
  source 1..25: mol_type = unassigned RNA
gcggagcagctgagagcctacctgg

SEQ ID NO: 1934 - RNA, 25 nt, Homo sapiens
  source 1..25: mol_type = unassigned RNA
gcggcggagcagctgagagcctacc

SEQ ID NO: 1935 - RNA, 25 nt, Homo sapiens
  source 1..25: mol_type = unassigned RNA
cgcaagttggaggcggcccgtgcgg

SEQ ID NO: 1936 - RNA, 25 nt, Homo sapiens
  source 1..25: mol_type = unassigned RNA
cagcgcaagttggaggcggcccgtg

SEQ ID NO: 1937 - RNA, 25 nt, Homo sapiens
  source 1..25: mol_type = unassigned RNA
cagatcacccagcgcaagttggagg

SEQ ID NO: 1938 - RNA, 25 nt, Homo sapiens
  source 1..25: mol_type = unassigned RNA
gctcagatcacccagcgcaagttgg

SEQ ID NO: 1939 - RNA, 25 nt, Homo sapiens
  source 1..25: mol_type = unassigned RNA
gcggctcagatcacccagcgcaagt

SEQ ID NO: 1940 - RNA, 25 nt, Homo sapiens
  source 1..25: mol_type = unassigned RNA
cgctcctggaccgccgcggacaccg

SEQ ID NO: 1941 - RNA, 25 nt, Homo sapiens
  source 1..25: mol_type = unassigned RNA
gaggacctgcgctcctggaccgccg

SEQ ID NO: 1942 - RNA, 25 nt, Homo sapiens
  source 1..25: mol_type = unassigned RNA
cgccctgaacgaggacctgcgctcc

SEQ ID NO: 1943 - RNA, 25 nt, Homo sapiens
  source 1..25: mol_type = unassigned RNA
ggcaaggattacatcgccctgaacg

SEQ ID NO: 1944 - RNA, 25 nt, Homo sapiens
  source 1..25: mol_type = unassigned RNA
tatgaccagtccgcctacgacggca

SEQ ID NO: 1945 - RNA, 25 nt, Homo sapiens
  source 1..25: mol_type = unassigned RNA
gcgggtatgaccagtccgcctacga

SEQ ID NO: 1946 - RNA, 25 nt, Homo sapiens
  source 1..25: mol_type = unassigned RNA
ggggcccgacgggcgcctcctccgc

SEQ ID NO: 1947 - RNA, 25 nt, Homo sapiens
  source 1..25: mol_type = unassigned RNA
tggggcccgacgggcgcctcctccg

SEQ ID NO: 1948 - RNA, 25 nt, Homo sapiens
  source 1..25: mol_type = unassigned RNA
gtctggctgcgacctggggcccgac

SEQ ID NO: 1949 - RNA, 25 nt, Homo sapiens
  source 1..25: mol_type = unassigned RNA
tgtctggctgcgacctggggcccga

SEQ ID NO: 1950 - RNA, 25 nt, Homo sapiens
  source 1..25: mol_type = unassigned RNA
ccagaggatgtctggctgcgacctg

SEQ ID NO: 1951 - RNA, 25 nt, Homo sapiens
  source 1..25: mol_type = unassigned RNA
tccagaggatgtctggctgcgacct

SEQ ID NO: 1952 - RNA, 25 nt, Homo sapiens
  source 1..25: mol_type = unassigned RNA
ctccagaggatgtctggctgcgacc

SEQ ID NO: 1953 - RNA, 25 nt, Homo sapiens
  source 1..25: mol_type = unassigned RNA
ggtctcacaccctccagaggatgtc

SEQ ID NO: 1954 - RNA, 25 nt, Homo sapiens
  source 1..25: mol_type = unassigned RNA
ggggccagggtctcacaccctccag

SEQ ID NO: 1955 - RNA, 25 nt, Homo sapiens
  source 1..25: mol_type = unassigned RNA
ccggggtcactcaccgtcctcgctc

SEQ ID NO: 1956 - RNA, 25 nt, Homo sapiens
  source 1..25: mol_type = unassigned RNA
ctcgctctggttgtagtagccgcgc

SEQ ID NO: 1957 - RNA, 25 nt, Homo sapiens
  source 1..25: mol_type = unassigned RNA
gttgtagtagccgcgcaggttccgc

SEQ ID NO: 1958 - RNA, 25 nt, Homo sapiens
  source 1..25: mol_type = unassigned RNA
gccgcgcaggttccgcaggctcact

SEQ ID NO: 1959 - RNA, 25 nt, Homo sapiens
  source 1..25: mol_type = unassigned RNA
caggctcactcggtcagcctgtgcc

SEQ ID NO: 1960 - RNA, 25 nt, Homo sapiens
  source 1..25: mol_type = unassigned RNA
ctggcgcttgtacttctgtgtctcc

SEQ ID NO: 1961 - RNA, 25 nt, Homo sapiens
  source 1..25: mol_type = unassigned RNA
tctgtgtctcccggtcccaatactc

SEQ ID NO: 1962 - RNA, 25 nt, Homo sapiens
  source 1..25: mol_type = unassigned RNA
actccggcccctcctgctccaccca

SEQ ID NO: 1963 - RNA, 25 nt, Homo sapiens
  source 1..25: mol_type = unassigned RNA
cctcctgctccacccacggcgcccg

SEQ ID NO: 1964 - RNA, 25 nt, Homo sapiens
  source 1..25: mol_type = unassigned RNA
cccacggcgcccgcggctcccctct

SEQ ID NO: 1965 - RNA, 25 nt, Homo sapiens
  source 1..25: mol_type = unassigned RNA
gcccgcggctcccctctcggactcg

SEQ ID NO: 1966 - RNA, 25 nt, Homo sapiens
  source 1..25: mol_type = unassigned RNA
gtccacgtagcccactgagatgaag

SEQ ID NO: 1967 - RNA, 25 nt, Homo sapiens
  source 1..25: mol_type = unassigned RNA
tccacgtagcccactgagatgaagc

SEQ ID NO: 1968 - RNA, 25 nt, Homo sapiens
  source 1..25: mol_type = unassigned RNA
ccacgtagcccactgagatgaagcg

SEQ ID NO: 1969 - RNA, 25 nt, Homo sapiens
  source 1..25: mol_type = unassigned RNA
cactgagatgaagcggggctctccg

SEQ ID NO: 1970 - RNA, 25 nt, Homo sapiens
  source 1..25: mol_type = unassigned RNA
gagatgaagcggggctctccgcggc

SEQ ID NO: 1971 - RNA, 25 nt, Homo sapiens
  source 1..25: mol_type = unassigned RNA
agatgaagcggggctctccgcggcc

SEQ ID NO: 1972 - RNA, 25 nt, Homo sapiens
  source 1..25: mol_type = unassigned RNA
gaagcggggctctccgcggccgggc

SEQ ID NO: 1973 - RNA, 25 nt, Homo sapiens
  source 1..25: mol_type = unassigned RNA
aagcggggctctccgcggccgggcc

SEQ ID NO: 1974 - RNA, 25 nt, Homo sapiens
  source 1..25: mol_type = unassigned RNA
ggctctccgcggccgggccgggaca

SEQ ID NO: 1975 - RNA, 25 nt, Homo sapiens
  source 1..25: mol_type = unassigned RNA
tctccgcggccgggccgggacacgg

SEQ ID NO: 1976 - RNA, 25 nt, Homo sapiens
  source 1..25: mol_type = unassigned RNA
gacacggcggtgtcgaaatacctca

SEQ ID NO: 1977 - RNA, 25 nt, Homo sapiens
  source 1..25: mol_type = unassigned RNA
ggcggtgtcgaaatacctcatggag

SEQ ID NO: 1978 - RNA, 25 nt, Homo sapiens
  source 1..25: mol_type = unassigned RNA
gcggtgtcgaaatacctcatggagt

SEQ ID NO: 1979 - RNA, 25 nt, Homo sapiens
  source 1..25: mol_type = unassigned RNA
cgaaatacctcatggagtgggagcc

SEQ ID NO: 1980 - RNA, 25 nt, Homo sapiens
  source 1..25: mol_type = unassigned RNA
gaaatacctcatggagtgggagcct

SEQ ID NO: 1981 - RNA, 25 nt, Homo sapiens
  source 1..25: mol_type = unassigned RNA
aaatacctcatggagtgggagcctg

SEQ ID NO: 1982 - RNA, 25 nt, Homo sapiens
  source 1..25: mol_type = unassigned RNA
aatacctcatggagtgggagcctgg

SEQ ID NO: 1983 - RNA, 25 nt, Homo sapiens
  source 1..25: mol_type = unassigned RNA
ctcatggagtgggagcctgggggcg

SEQ ID NO: 1984 - RNA, 25 nt, Homo sapiens
  source 1..25: mol_type = unassigned RNA
atggagtgggagcctgggggcgagg

SEQ ID NO: 1985 - RNA, 25 nt, Homo sapiens
  source 1..25: mol_type = unassigned RNA
tggagtgggagcctgggggcgagga

SEQ ID NO: 1986 - RNA, 25 nt, Homo sapiens
  source 1..25: mol_type = unassigned RNA
ggagtgggagcctgggggcgaggag

SEQ ID NO: 1987 - RNA, 25 nt, Homo sapiens
  source 1..25: mol_type = unassigned RNA
gaggacggtgagtgaccccggcccg

SEQ ID NO: 1988 - RNA, 25 nt, Homo sapiens
  source 1..25: mol_type = unassigned RNA
cgaggacggtgagtgaccccggccc

SEQ ID NO: 1989 - RNA, 25 nt, Homo sapiens
  source 1..25: mol_type = unassigned RNA
gcgaggacggtgagtgaccccggcc

SEQ ID NO: 1990 - RNA, 25 nt, Homo sapiens
  source 1..25: mol_type = unassigned RNA
ccagagcgaggacggtgagtgaccc

SEQ ID NO: 1991 - RNA, 25 nt, Homo sapiens
  source 1..25: mol_type = unassigned RNA
gcggctactacaaccagagcgagga

SEQ ID NO: 1992 - RNA, 25 nt, Homo sapiens
  source 1..25: mol_type = unassigned RNA
ctgcgcggctactacaaccagagcg

SEQ ID NO: 1993 - RNA, 25 nt, Homo sapiens
  source 1..25: mol_type = unassigned RNA
accgagtgagcctgcggaacctgcg

SEQ ID NO: 1994 - RNA, 25 nt, Homo sapiens
  source 1..25: mol_type = unassigned RNA
ggcacaggctgaccgagtgagcctg

SEQ ID NO: 1995 - RNA, 25 nt, Homo sapiens
  source 1..25: mol_type = unassigned RNA
acacagaagtacaagcgccaggcac

SEQ ID NO: 1996 - RNA, 25 nt, Homo sapiens
  source 1..25: mol_type = unassigned RNA
cgggagacacagaagtacaagcgcc

SEQ ID NO: 1997 - RNA, 25 nt, Homo sapiens
  source 1..25: mol_type = unassigned RNA
caggaggggccggagtattgggacc

SEQ ID NO: 1998 - RNA, 25 nt, Homo sapiens
  source 1..25: mol_type = unassigned RNA
gcaggaggggccggagtattgggac

SEQ ID NO: 1999 - RNA, 25 nt, Homo sapiens
  source 1..25: mol_type = unassigned RNA
gtggagcaggaggggccggagtatt

SEQ ID NO: 2000 - RNA, 25 nt, Homo sapiens
  source 1..25: mol_type = unassigned RNA
ggtggagcaggaggggccggagtat

SEQ ID NO: 2001 - RNA, 25 nt, Homo sapiens
  source 1..25: mol_type = unassigned RNA
gcgccgtgggtggagcaggaggggc

SEQ ID NO: 2002 - RNA, 25 nt, Homo sapiens
  source 1..25: mol_type = unassigned RNA
gcgggcgccgtgggtggagcaggag

SEQ ID NO: 2003 - RNA, 25 nt, Homo sapiens
  source 1..25: mol_type = unassigned RNA
cgcgggcgccgtgggtggagcagga

SEQ ID NO: 2004 - RNA, 25 nt, Homo sapiens
  source 1..25: mol_type = unassigned RNA
ccgcgggcgccgtgggtggagcagg

SEQ ID NO: 2005 - RNA, 25 nt, Homo sapiens
  source 1..25: mol_type = unassigned RNA
gagccgcgggcgccgtgggtggagc

SEQ ID NO: 2006 - RNA, 25 nt, Homo sapiens
  source 1..25: mol_type = unassigned RNA
agaggggagccgcgggcgccgtggg

SEQ ID NO: 2007 - RNA, 25 nt, Homo sapiens
  source 1..25: mol_type = unassigned RNA
ccgagaggggagccgcgggcgccgt

SEQ ID NO: 2008 - RNA, 25 nt, Homo sapiens
  source 1..25: mol_type = unassigned RNA
tccgagaggggagccgcgggcgccg

SEQ ID NO: 2009 - RNA, 25 nt, Homo sapiens
  source 1..25: mol_type = unassigned RNA
gccgcgagtccgagaggggagccgc

SEQ ID NO: 2010 - RNA, 25 nt, Homo sapiens
  source 1..25: mol_type = unassigned RNA
cgccgcgagtccgagaggggagccg

SEQ ID NO: 2011 - RNA, 25 nt, Homo sapiens
  source 1..25: mol_type = unassigned RNA
gacagcgacgccgcgagtccgagag

SEQ ID NO: 2012 - RNA, 25 nt, Homo sapiens
  source 1..25: mol_type = unassigned RNA
cgacagcgacgccgcgagtccgaga

SEQ ID NO: 2013 - RNA, 25 nt, Homo sapiens
  source 1..25: mol_type = unassigned RNA
tcgacagcgacgccgcgagtccgag

SEQ ID NO: 2014 - RNA, 25 nt, Homo sapiens
  source 1..25: mol_type = unassigned RNA
ctacgtggacgacacgcagttcgtg

SEQ ID NO: 2015 - RNA, 25 nt, Homo sapiens
  source 1..25: mol_type = unassigned RNA
ccccgcttcatctcagtgggctacg

SEQ ID NO: 2016 - RNA, 25 nt, Homo sapiens
  source 1..25: mol_type = unassigned RNA
gcggagagccccgcttcatctcagt

SEQ ID NO: 2017 - RNA, 25 nt, Homo sapiens
  source 1..25: mol_type = unassigned RNA
cgcggagagccccgcttcatctcag

SEQ ID NO: 2018 - RNA, 25 nt, Homo sapiens
  source 1..25: mol_type = unassigned RNA
acaccgccgtgtcccggcccggccg

SEQ ID NO: 2019 - RNA, 25 nt, Homo sapiens
  source 1..25: mol_type = unassigned RNA
atttcgacaccgccgtgtcccggcc

SEQ ID NO: 2020 - RNA, 25 nt, Homo sapiens
  source 1..25: mol_type = unassigned RNA
gaggtatttcgacaccgccgtgtcc

SEQ ID NO: 2021 - RNA, 25 nt, Homo sapiens
  source 1..25: mol_type = unassigned RNA
ctcgcccccaggctcccactccatg

SEQ ID NO: 2022 - RNA, 25 nt, Homo sapiens
  source 1..25: mol_type = unassigned RNA
gcttccctcccaaccccgcactcac

SEQ ID NO: 2023 - RNA, 25 nt, Homo sapiens
  source 1..25: mol_type = unassigned RNA
ctcccaaccccgcactcacaggccc

SEQ ID NO: 2024 - RNA, 25 nt, Homo sapiens
  source 1..25: mol_type = unassigned RNA
accccgcactcacaggcccaggtct

SEQ ID NO: 2025 - RNA, 25 nt, Homo sapiens
  source 1..25: mol_type = unassigned RNA
gcactcacaggcccaggtctcggtc

SEQ ID NO: 2026 - RNA, 25 nt, Homo sapiens
  source 1..25: mol_type = unassigned RNA
cactcacaggcccaggtctcggtca

SEQ ID NO: 2027 - RNA, 25 nt, Homo sapiens
  source 1..25: mol_type = unassigned RNA
acaggcccaggtctcggtcagggcc

SEQ ID NO: 2028 - RNA, 25 nt, Homo sapiens
  source 1..25: mol_type = unassigned RNA
cagggccaggcctcccgagagcagc

SEQ ID NO: 2029 - RNA, 25 nt, Homo sapiens
  source 1..25: mol_type = unassigned RNA
ggccaggcctcccgagagcagcagg

SEQ ID NO: 2030 - RNA, 25 nt, Homo sapiens
  source 1..25: mol_type = unassigned RNA
caggcctcccgagagcagcaggagg

SEQ ID NO: 2031 - RNA, 25 nt, Homo sapiens
  source 1..25: mol_type = unassigned RNA
aggcctcccgagagcagcaggagga

SEQ ID NO: 2032 - RNA, 25 nt, Homo sapiens
  source 1..25: mol_type = unassigned RNA
tcccgagagcagcaggaggagggct

SEQ ID NO: 2033 - RNA, 25 nt, Homo sapiens
  source 1..25: mol_type = unassigned RNA
cccgagagcagcaggaggagggctc

SEQ ID NO: 2034 - RNA, 25 nt, Homo sapiens
  source 1..25: mol_type = unassigned RNA
ccgagagcagcaggaggagggctcg

SEQ ID NO: 2035 - RNA, 25 nt, Homo sapiens
  source 1..25: mol_type = unassigned RNA
gctcggggcgccatgacccgcatct

SEQ ID NO: 2036 - RNA, 25 nt, Homo sapiens
  source 1..25: mol_type = unassigned RNA
gcgccatgacccgcatctcggcctc

SEQ ID NO: 2037 - RNA, 25 nt, Homo sapiens
  source 1..25: mol_type = unassigned RNA
cgccatgacccgcatctcggcctct

SEQ ID NO: 2038 - RNA, 25 nt, Homo sapiens
  source 1..25: mol_type = unassigned RNA
gccatgacccgcatctcggcctctg

SEQ ID NO: 2039 - RNA, 25 nt, Homo sapiens
  source 1..25: mol_type = unassigned RNA
tcggcctctggggagaatgtgagtc

SEQ ID NO: 2040 - RNA, 25 nt, Homo sapiens
  source 1..25: mol_type = unassigned RNA
cggcctctggggagaatgtgagtcc

SEQ ID NO: 2041 - RNA, 25 nt, Homo sapiens
  source 1..25: mol_type = unassigned RNA
cctctggggagaatgtgagtccggg

SEQ ID NO: 2042 - RNA, 25 nt, Homo sapiens
  source 1..25: mol_type = unassigned RNA
ctctggggagaatgtgagtccgggt

SEQ ID NO: 2043 - RNA, 25 nt, Homo sapiens
  source 1..25: mol_type = unassigned RNA
gagaatgtgagtccgggtgggtgac

SEQ ID NO: 2044 - RNA, 25 nt, Homo sapiens
  source 1..25: mol_type = unassigned RNA
agaatgtgagtccgggtgggtgact

SEQ ID NO: 2045 - RNA, 25 nt, Homo sapiens
  source 1..25: mol_type = unassigned RNA
gaatgtgagtccgggtgggtgactg

SEQ ID NO: 2046 - RNA, 25 nt, Homo sapiens
  source 1..25: mol_type = unassigned RNA
ggtgggtgactggggactttagaac

SEQ ID NO: 2047 - RNA, 25 nt, Homo sapiens
  source 1..25: mol_type = unassigned RNA
gtgggtgactggggactttagaacc

SEQ ID NO: 2048 - RNA, 25 nt, Homo sapiens
  source 1..25: mol_type = unassigned RNA
actggggactttagaaccgggactg

SEQ ID NO: 2049 - RNA, 25 nt, Homo sapiens
  source 1..25: mol_type = unassigned RNA
gaaccgggactgcggagacgctgat

SEQ ID NO: 2050 - RNA, 25 nt, Homo sapiens
  source 1..25: mol_type = unassigned RNA
tgggcctgtgagtgcggggttggga

SEQ ID NO: 2051 - RNA, 25 nt, Homo sapiens
  source 1..25: mol_type = unassigned RNA
ctgggcctgtgagtgcggggttggg

SEQ ID NO: 2052 - RNA, 25 nt, Homo sapiens
  source 1..25: mol_type = unassigned RNA
gacctgggcctgtgagtgcggggtt

SEQ ID NO: 2053 - RNA, 25 nt, Homo sapiens
  source 1..25: mol_type = unassigned RNA
agacctgggcctgtgagtgcggggt

SEQ ID NO: 2054 - RNA, 25 nt, Homo sapiens
  source 1..25: mol_type = unassigned RNA
accgagacctgggcctgtgagtgcg

SEQ ID NO: 2055 - RNA, 25 nt, Homo sapiens
  source 1..25: mol_type = unassigned RNA
gaccgagacctgggcctgtgagtgc

SEQ ID NO: 2056 - RNA, 25 nt, Homo sapiens
  source 1..25: mol_type = unassigned RNA
tgaccgagacctgggcctgtgagtg

SEQ ID NO: 2057 - RNA, 25 nt, Homo sapiens
  source 1..25: mol_type = unassigned RNA
ggaggcctggccctgaccgagacct

SEQ ID NO: 2058 - RNA, 25 nt, Homo sapiens
  source 1..25: mol_type = unassigned RNA
gggaggcctggccctgaccgagacc

SEQ ID NO: 2059 - RNA, 25 nt, Homo sapiens
  source 1..25: mol_type = unassigned RNA
ctcctcctgctgctctcgggaggcc

SEQ ID NO: 2060 - RNA, 25 nt, Homo sapiens
  source 1..25: mol_type = unassigned RNA
gagccctcctcctgctgctctcggg

SEQ ID NO: 2061 - RNA, 25 nt, Homo sapiens
  source 1..25: mol_type = unassigned RNA
cccgagccctcctcctgctgctctc

SEQ ID NO: 2062 - RNA, 25 nt, Homo sapiens
  source 1..25: mol_type = unassigned RNA
ccccgagccctcctcctgctgctct

SEQ ID NO: 2063 - RNA, 25 nt, Homo sapiens
  source 1..25: mol_type = unassigned RNA
tccccagaggccgagatgcgggtca

SEQ ID NO: 2064 - RNA, 25 nt, Homo sapiens
  source 1..25: mol_type = unassigned RNA
acattctccccagaggccgagatgc

SEQ ID NO: 2065 - RNA, 25 nt, Homo sapiens
  source 1..25: mol_type = unassigned RNA
cacattctccccagaggccgagatg

SEQ ID NO: 2066 - RNA, 25 nt, Homo sapiens
  source 1..25: mol_type = unassigned RNA
ccacccggactcacattctccccag

SEQ ID NO: 2067 - RNA, 25 nt, Homo sapiens
  source 1..25: mol_type = unassigned RNA
gttctaaagtccccagtcacccacc

SEQ ID NO: 2068 - RNA, 25 nt, Homo sapiens
  source 1..25: mol_type = unassigned RNA
aagccaatcagcgtctccgcagtcc

SEQ ID NO: 2069 - RNA, 25 nt, Homo sapiens
  source 1..25: mol_type = unassigned RNA
ttttattatgatgtttctccatatt

SEQ ID NO: 2070 - RNA, 25 nt, Homo sapiens
  source 1..25: mol_type = unassigned RNA
tctccatatttggcattgctgtaaa

SEQ ID NO: 2071 - RNA, 25 nt, Homo sapiens
  source 1..25: mol_type = unassigned RNA
aaatggctaacatttactgccaatt

SEQ ID NO: 2072 - RNA, 25 nt, Homo sapiens
  source 1..25: mol_type = unassigned RNA
ttactgccaattcggtacaaatgtg

SEQ ID NO: 2073 - RNA, 25 nt, Homo sapiens
  source 1..25: mol_type = unassigned RNA
gccaattcggtacaaatgtgtggtt

SEQ ID NO: 2074 - RNA, 25 nt, Homo sapiens
  source 1..25: mol_type = unassigned RNA
aataaaagttaaacatttccacaca

SEQ ID NO: 2075 - RNA, 25 nt, Homo sapiens
  source 1..25: mol_type = unassigned RNA
tttacagtctgacatttcactgcgt

SEQ ID NO: 2076 - RNA, 25 nt, Homo sapiens
  source 1..25: mol_type = unassigned RNA
aaaactacaacttttatttttaaac

SEQ ID NO: 2077 - RNA, 25 nt, Homo sapiens
  source 1..25: mol_type = unassigned RNA
acttttatttttaaacaggagtcac

SEQ ID NO: 2078 - RNA, 25 nt, Homo sapiens
  source 1..25: mol_type = unassigned RNA
tatatgtagttaagcaagttatttg

SEQ ID NO: 2079 - RNA, 25 nt, Homo sapiens
  source 1..25: mol_type = unassigned RNA
atgtagttaagcaagttatttgagg

SEQ ID NO: 2080 - RNA, 25 nt, Homo sapiens
  source 1..25: mol_type = unassigned RNA
tgtagttaagcaagttatttgagga

SEQ ID NO: 2081 - RNA, 25 nt, Homo sapiens
  source 1..25: mol_type = unassigned RNA
agaagcaaatcctttcctgaaaacc

SEQ ID NO: 2082 - RNA, 25 nt, Homo sapiens
  source 1..25: mol_type = unassigned RNA
ttcctgaaaacctggtcactaatcc

SEQ ID NO: 2083 - RNA, 25 nt, Homo sapiens
  source 1..25: mol_type = unassigned RNA
tcctgaaaacctggtcactaatcct

SEQ ID NO: 2084 - RNA, 25 nt, Homo sapiens
  source 1..25: mol_type = unassigned RNA
tgaaaacctggtcactaatcctggg

SEQ ID NO: 2085 - RNA, 25 nt, Homo sapiens
  source 1..25: mol_type = unassigned RNA
cctggtcactaatcctgggtggacc

SEQ ID NO: 2086 - RNA, 25 nt, Homo sapiens
  source 1..25: mol_type = unassigned RNA
tggaccaggttgcttgaaaatagtc

SEQ ID NO: 2087 - RNA, 25 nt, Homo sapiens
  source 1..25: mol_type = unassigned RNA
ggaccaggttgcttgaaaatagtct

SEQ ID NO: 2088 - RNA, 25 nt, Homo sapiens
  source 1..25: mol_type = unassigned RNA
tgggaaattacgaaactccacccaa

SEQ ID NO: 2089 - RNA, 25 nt, Homo sapiens
  source 1..25: mol_type = unassigned RNA
gggaaattacgaaactccacccaaa

SEQ ID NO: 2090 - RNA, 25 nt, Homo sapiens
  source 1..25: mol_type = unassigned RNA
aacacattcacctacagctacagtc

SEQ ID NO: 2091 - RNA, 25 nt, Homo sapiens
  source 1..25: mol_type = unassigned RNA
acacattcacctacagctacagtca

SEQ ID NO: 2092 - RNA, 25 nt, Homo sapiens
  source 1..25: mol_type = unassigned RNA
acagtcagggagtgaccagccaaga

SEQ ID NO: 2093 - RNA, 25 nt, Homo sapiens
  source 1..25: mol_type = unassigned RNA
ccagccaagatggaaatctcactga

SEQ ID NO: 2094 - RNA, 25 nt, Homo sapiens
  source 1..25: mol_type = unassigned RNA
atggaaatctcactgaaggctacca

SEQ ID NO: 2095 - RNA, 25 nt, Homo sapiens
  source 1..25: mol_type = unassigned RNA
atctcactgaaggctaccatggttc

SEQ ID NO: 2096 - RNA, 25 nt, Homo sapiens
  source 1..25: mol_type = unassigned RNA
ttgtataacaatatttttcattcca

SEQ ID NO: 2097 - RNA, 25 nt, Homo sapiens
  source 1..25: mol_type = unassigned RNA
ttcattccatggtgatgtagttttc

SEQ ID NO: 2098 - RNA, 25 nt, Homo sapiens
  source 1..25: mol_type = unassigned RNA
tcattccatggtgatgtagttttca

SEQ ID NO: 2099 - RNA, 25 nt, Homo sapiens
  source 1..25: mol_type = unassigned RNA
tgatgtagttttcagggtttttaaa

SEQ ID NO: 2100 - RNA, 25 nt, Homo sapiens
  source 1..25: mol_type = unassigned RNA
gatgtagttttcagggtttttaaaa

SEQ ID NO: 2101 - RNA, 25 nt, Homo sapiens
  source 1..25: mol_type = unassigned RNA
aaagggaactaaaattatgagactt

SEQ ID NO: 2102 - RNA, 25 nt, Homo sapiens
  source 1..25: mol_type = unassigned RNA
taaaattatgagacttaggtgaaac

SEQ ID NO: 2103 - RNA, 25 nt, Homo sapiens
  source 1..25: mol_type = unassigned RNA
attgctccctgcctctgaattctga

SEQ ID NO: 2104 - RNA, 25 nt, Homo sapiens
  source 1..25: mol_type = unassigned RNA
ttgctccctgcctctgaattctgaa

SEQ ID NO: 2105 - RNA, 25 nt, Homo sapiens
  source 1..25: mol_type = unassigned RNA
ctgcctctgaattctgaagggagcg

SEQ ID NO: 2106 - RNA, 25 nt, Homo sapiens
  source 1..25: mol_type = unassigned RNA
ctgaagggagcgtggctttccttca

SEQ ID NO: 2107 - RNA, 25 nt, Homo sapiens
  source 1..25: mol_type = unassigned RNA
acacaaatcatgttagttttccttt

SEQ ID NO: 2108 - RNA, 25 nt, Homo sapiens
  source 1..25: mol_type = unassigned RNA
cacaaatcatgttagttttcctttt

SEQ ID NO: 2109 - RNA, 25 nt, Homo sapiens
  source 1..25: mol_type = unassigned RNA
acaaatcatgttagttttccttttg

SEQ ID NO: 2110 - RNA, 25 nt, Homo sapiens
  source 1..25: mol_type = unassigned RNA
aatcatgttagttttccttttgggg

SEQ ID NO: 2111 - RNA, 25 nt, Homo sapiens
  source 1..25: mol_type = unassigned RNA
gttagttttccttttggggtggcca

SEQ ID NO: 2112 - RNA, 25 nt, Homo sapiens
  source 1..25: mol_type = unassigned RNA
ggccaaggtttcctcccatagtttt

SEQ ID NO: 2113 - RNA, 25 nt, Homo sapiens
  source 1..25: mol_type = unassigned RNA
gtttcctcccatagttttaggcatt

SEQ ID NO: 2114 - RNA, 25 nt, Homo sapiens
  source 1..25: mol_type = unassigned RNA
cctacaaacactaaaaatacttttc

SEQ ID NO: 2115 - RNA, 25 nt, Homo sapiens
  source 1..25: mol_type = unassigned RNA
gaagttactacaaacttcaacagtt

SEQ ID NO: 2116 - RNA, 25 nt, Homo sapiens
  source 1..25: mol_type = unassigned RNA
aagttactacaaacttcaacagttt

SEQ ID NO: 2117 - RNA, 25 nt, Homo sapiens
  source 1..25: mol_type = unassigned RNA
tactacaaacttcaacagtttgggt

SEQ ID NO: 2118 - RNA, 25 nt, Homo sapiens
  source 1..25: mol_type = unassigned RNA
actacaaacttcaacagtttgggtt

SEQ ID NO: 2119 - RNA, 25 nt, Homo sapiens
  source 1..25: mol_type = unassigned RNA
caaacttcaacagtttgggttggga

SEQ ID NO: 2120 - RNA, 25 nt, Homo sapiens
  source 1..25: mol_type = unassigned RNA
tgggatggccagataacacatacat

SEQ ID NO: 2121 - RNA, 25 nt, Homo sapiens
  source 1..25: mol_type = unassigned RNA
tttcttttcccccacgtatcctaaa

SEQ ID NO: 2122 - RNA, 25 nt, Homo sapiens
  source 1..25: mol_type = unassigned RNA
ttcttttcccccacgtatcctaaaa

SEQ ID NO: 2123 - RNA, 25 nt, Homo sapiens
  source 1..25: mol_type = unassigned RNA
tctattttttgagcgccaagattgt

SEQ ID NO: 2124 - RNA, 25 nt, Homo sapiens
  source 1..25: mol_type = unassigned RNA
ctattttttgagcgccaagattgtt

SEQ ID NO: 2125 - RNA, 25 nt, Homo sapiens
  source 1..25: mol_type = unassigned RNA
agattaatgtgtgagatgtgctttc

SEQ ID NO: 2126 - RNA, 25 nt, Homo sapiens
  source 1..25: mol_type = unassigned RNA
gttttaaccacataacattctataa

SEQ ID NO: 2127 - RNA, 25 nt, Homo sapiens
  source 1..25: mol_type = unassigned RNA
ataagaatattcaagcagttttctt

SEQ ID NO: 2128 - RNA, 25 nt, Homo sapiens
  source 1..25: mol_type = unassigned RNA
cttaggcaccaaaaatttatccagc

SEQ ID NO: 2129 - RNA, 25 nt, Homo sapiens
  source 1..25: mol_type = unassigned RNA
ttaggcaccaaaaatttatccagcc

SEQ ID NO: 2130 - RNA, 25 nt, Homo sapiens
  source 1..25: mol_type = unassigned RNA
aacaaaaacatgtcctcattttatt

SEQ ID NO: 2131 - RNA, 25 nt, Homo sapiens
  source 1..25: mol_type = unassigned RNA
ttatttggaaataaactcttgttgt

SEQ ID NO: 2132 - RNA, 25 nt, Homo sapiens
  source 1..25: mol_type = unassigned RNA
aataaactcttgttgtaggatagaa

SEQ ID NO: 2133 - RNA, 25 nt, Homo sapiens
  source 1..25: mol_type = unassigned RNA
ggatagaaaggaattagtgtattat

SEQ ID NO: 2134 - RNA, 25 nt, Homo sapiens
  source 1..25: mol_type = unassigned RNA
agattctgcactatttacatattgc

SEQ ID NO: 2135 - RNA, 25 nt, Homo sapiens
  source 1..25: mol_type = unassigned RNA
gaagcttctgttgtcattcaactgc

SEQ ID NO: 2136 - RNA, 25 nt, Homo sapiens
  source 1..25: mol_type = unassigned RNA
aagcttctgttgtcattcaactgct

SEQ ID NO: 2137 - RNA, 25 nt, Homo sapiens
  source 1..25: mol_type = unassigned RNA
agcttctgttgtcattcaactgctg

SEQ ID NO: 2138 - RNA, 25 nt, Homo sapiens
  source 1..25: mol_type = unassigned RNA
gcttctgttgtcattcaactgctgg

SEQ ID NO: 2139 - RNA, 25 nt, Homo sapiens
  source 1..25: mol_type = unassigned RNA
tctgttgtcattcaactgctggggg

SEQ ID NO: 2140 - RNA, 25 nt, Homo sapiens
  source 1..25: mol_type = unassigned RNA
ctgttgtcattcaactgctggggga

SEQ ID NO: 2141 - RNA, 25 nt, Homo sapiens
  source 1..25: mol_type = unassigned RNA
tatgtgaaagtaacccgctattaga

SEQ ID NO: 2142 - RNA, 25 nt, Homo sapiens
  source 1..25: mol_type = unassigned RNA
aacccgctattagatggtgccttta

SEQ ID NO: 2143 - RNA, 25 nt, Homo sapiens
  source 1..25: mol_type = unassigned RNA
tacatactttacatactttagtgca

SEQ ID NO: 2144 - RNA, 25 nt, Homo sapiens
  source 1..25: mol_type = unassigned RNA
acatactttacatactttagtgcaa

SEQ ID NO: 2145 - RNA, 25 nt, Homo sapiens
  source 1..25: mol_type = unassigned RNA
catactttacatactttagtgcaag

SEQ ID NO: 2146 - RNA, 25 nt, Homo sapiens
  source 1..25: mol_type = unassigned RNA
aaacctgcgctgacagactcactgt

SEQ ID NO: 2147 - RNA, 25 nt, Homo sapiens
  source 1..25: mol_type = unassigned RNA
tgacagactcactgttggaatgaga

SEQ ID NO: 2148 - RNA, 25 nt, Homo sapiens
  source 1..25: mol_type = unassigned RNA
gacagactcactgttggaatgagaa

SEQ ID NO: 2149 - RNA, 25 nt, Homo sapiens
  source 1..25: mol_type = unassigned RNA
agactcactgttggaatgagaaggg

SEQ ID NO: 2150 - RNA, 25 nt, Homo sapiens
  source 1..25: mol_type = unassigned RNA
gttggaatgagaagggtggtcagaa

SEQ ID NO: 2151 - RNA, 25 nt, Homo sapiens
  source 1..25: mol_type = unassigned RNA
ttggaatgagaagggtggtcagaat

SEQ ID NO: 2152 - RNA, 25 nt, Homo sapiens
  source 1..25: mol_type = unassigned RNA
gaatgagaagggtggtcagaatggg

SEQ ID NO: 2153 - RNA, 25 nt, Homo sapiens
  source 1..25: mol_type = unassigned RNA
gaagggtggtcagaatgggaggcag

SEQ ID NO: 2154 - RNA, 25 nt, Homo sapiens
  source 1..25: mol_type = unassigned RNA
aggataacttcctctgtaatctcac

SEQ ID NO: 2155 - RNA, 25 nt, Homo sapiens
  source 1..25: mol_type = unassigned RNA
ggataacttcctctgtaatctcact

SEQ ID NO: 2156 - RNA, 25 nt, Homo sapiens
  source 1..25: mol_type = unassigned RNA
agcctcagcaaccttcactgcacac

SEQ ID NO: 2157 - RNA, 25 nt, Homo sapiens
  source 1..25: mol_type = unassigned RNA
ccctcttcccctagagcaaactgtt

SEQ ID NO: 2158 - RNA, 25 nt, Homo sapiens
  source 1..25: mol_type = unassigned RNA
tgcatgtacaaactataaatcatat

SEQ ID NO: 2159 - RNA, 25 nt, Homo sapiens
  source 1..25: mol_type = unassigned RNA
tcagttttctattacacaaataatt

SEQ ID NO: 2160 - RNA, 25 nt, Homo sapiens
  source 1..25: mol_type = unassigned RNA
ccttgaatagaaatcaaatttcttg

SEQ ID NO: 2161 - RNA, 25 nt, Homo sapiens
  source 1..25: mol_type = unassigned RNA
gttaagttttgagtttacagaaagt

SEQ ID NO: 2162 - RNA, 25 nt, Homo sapiens
  source 1..25: mol_type = unassigned RNA
gttttgagtttacagaaagttggta

SEQ ID NO: 2163 - RNA, 25 nt, Homo sapiens
  source 1..25: mol_type = unassigned RNA
gaaagttggtaaggtgcacacagaa

SEQ ID NO: 2164 - RNA, 25 nt, Homo sapiens
  source 1..25: mol_type = unassigned RNA
aaagttggtaaggtgcacacagaaa

SEQ ID NO: 2165 - RNA, 25 nt, Homo sapiens
  source 1..25: mol_type = unassigned RNA
aattttcaacagtgaagaaattcac

SEQ ID NO: 2166 - RNA, 25 nt, Homo sapiens
  source 1..25: mol_type = unassigned RNA
ttcacaggacttgtgttaaactcta

SEQ ID NO: 2167 - RNA, 25 nt, Homo sapiens
  source 1..25: mol_type = unassigned RNA
tgtgttaaactctatggcacacatt

SEQ ID NO: 2168 - RNA, 25 nt, Homo sapiens
  source 1..25: mol_type = unassigned RNA
gtgttaaactctatggcacacatta

SEQ ID NO: 2169 - RNA, 25 nt, Homo sapiens
  source 1..25: mol_type = unassigned RNA
ttagggatgtgtagttttacaaaca

SEQ ID NO: 2170 - RNA, 25 nt, Homo sapiens
  source 1..25: mol_type = unassigned RNA
agtagctgagctttcctgtaccatc

SEQ ID NO: 2171 - RNA, 25 nt, Homo sapiens
  source 1..25: mol_type = unassigned RNA
gtaccatcaggaaagattaaccaat

SEQ ID NO: 2172 - RNA, 25 nt, Homo sapiens
  source 1..25: mol_type = unassigned RNA
gaaagattaaccaattggtgacaga

SEQ ID NO: 2173 - RNA, 25 nt, Homo sapiens
  source 1..25: mol_type = unassigned RNA
aaagattaaccaattggtgacagat

SEQ ID NO: 2174 - RNA, 25 nt, Homo sapiens
  source 1..25: mol_type = unassigned RNA
ttggtgacagatgggaatgtgaaaa

SEQ ID NO: 2175 - RNA, 25 nt, Homo sapiens
  source 1..25: mol_type = unassigned RNA
tggtgacagatgggaatgtgaaaat

SEQ ID NO: 2176 - RNA, 25 nt, Homo sapiens
  source 1..25: mol_type = unassigned RNA
tttgccatattagagatttagtttt

SEQ ID NO: 2177 - RNA, 25 nt, Homo sapiens
  source 1..25: mol_type = unassigned RNA
ttgccatattagagatttagttttt

SEQ ID NO: 2178 - RNA, 25 nt, Homo sapiens
  source 1..25: mol_type = unassigned RNA
tagtttttgggtaaagtttagtgag

SEQ ID NO: 2179 - RNA, 25 nt, Homo sapiens
  source 1..25: mol_type = unassigned RNA
aaaagtctctcagctgtgttacagc

SEQ ID NO: 2180 - RNA, 25 nt, Homo sapiens
  source 1..25: mol_type = unassigned RNA
ctcagctgtgttacagctggttatc

SEQ ID NO: 2181 - RNA, 25 nt, Homo sapiens
  source 1..25: mol_type = unassigned RNA
aagaagttatacaaactacttcaaa

SEQ ID NO: 2182 - RNA, 25 nt, Homo sapiens
  source 1..25: mol_type = unassigned RNA
cttgccatatagccattgcaaaaat

SEQ ID NO: 2183 - RNA, 25 nt, Homo sapiens
  source 1..25: mol_type = unassigned RNA
ttgccatatagccattgcaaaaata

SEQ ID NO: 2184 - RNA, 25 nt, Homo sapiens
  source 1..25: mol_type = unassigned RNA
atagccattgcaaaaatagggcgtt

SEQ ID NO: 2185 - RNA, 25 nt, Homo sapiens
  source 1..25: mol_type = unassigned RNA
caaaaatagggcgttaggtacagac

SEQ ID NO: 2186 - RNA, 25 nt, Homo sapiens
  source 1..25: mol_type = unassigned RNA
aaaaatagggcgttaggtacagaca

SEQ ID NO: 2187 - RNA, 25 nt, Homo sapiens
  source 1..25: mol_type = unassigned RNA
ggcgttaggtacagacagggcctct

SEQ ID NO: 2188 - RNA, 25 nt, Homo sapiens
  source 1..25: mol_type = unassigned RNA
aaccatcatccacagtttacccagc

SEQ ID NO: 2189 - RNA, 25 nt, Homo sapiens
  source 1..25: mol_type = unassigned RNA
atccacagtttacccagcaggtcac

SEQ ID NO: 2190 - RNA, 25 nt, Homo sapiens
  source 1..25: mol_type = unassigned RNA
agtttacccagcaggtcactggact

SEQ ID NO: 2191 - RNA, 25 nt, Homo sapiens
  source 1..25: mol_type = unassigned RNA
ctggactaggtgctctataccagtt

SEQ ID NO: 2192 - RNA, 25 nt, Homo sapiens
  source 1..25: mol_type = unassigned RNA
ttttttttttttttgacaagaatac

SEQ ID NO: 2193 - RNA, 25 nt, Homo sapiens
  source 1..25: mol_type = unassigned RNA
tactggagatttgagtcaatttttg

SEQ ID NO: 2194 - RNA, 25 nt, Homo sapiens
  source 1..25: mol_type = unassigned RNA
ggtcttctgatagctaagtgccatc

SEQ ID NO: 2195 - RNA, 25 nt, Homo sapiens
  source 1..25: mol_type = unassigned RNA
gattgattaatgtttagagtttatt

SEQ ID NO: 2196 - RNA, 25 nt, Homo sapiens
  source 1..25: mol_type = unassigned RNA
attgattaatgtttagagtttattt

SEQ ID NO: 2197 - RNA, 25 nt, Homo sapiens
  source 1..25: mol_type = unassigned RNA
agcaagcgtagttcactaaatataa

SEQ ID NO: 2198 - RNA, 25 nt, Homo sapiens
  source 1..25: mol_type = unassigned RNA
aaaaccagacagtaatagctataaa

SEQ ID NO: 2199 - RNA, 25 nt, Homo sapiens
  source 1..25: mol_type = unassigned RNA
gatatacacttgtaaactttttttc

SEQ ID NO: 2200 - RNA, 25 nt, Homo sapiens
  source 1..25: mol_type = unassigned RNA
atcaaaaatgctatcctaactatac

SEQ ID NO: 2201 - RNA, 25 nt, Homo sapiens
  source 1..25: mol_type = unassigned RNA
tcaaaaatgctatcctaactataca

SEQ ID NO: 2202 - RNA, 25 nt, Homo sapiens
  source 1..25: mol_type = unassigned RNA
caaaaatgctatcctaactatacag

SEQ ID NO: 2203 - RNA, 25 nt, Homo sapiens
  source 1..25: mol_type = unassigned RNA
aaaaatgctatcctaactatacagg

SEQ ID NO: 2204 - RNA, 25 nt, Homo sapiens
  source 1..25: mol_type = unassigned RNA
aaaatgctatcctaactatacaggg

SEQ ID NO: 2205 - RNA, 25 nt, Homo sapiens
  source 1..25: mol_type = unassigned RNA
aaatgctatcctaactatacagggg

SEQ ID NO: 2206 - RNA, 25 nt, Homo sapiens
  source 1..25: mol_type = unassigned RNA
aatgctatcctaactatacaggggg

SEQ ID NO: 2207 - RNA, 25 nt, Homo sapiens
  source 1..25: mol_type = unassigned RNA
aagagaaagttcatcacacagactt

SEQ ID NO: 2208 - RNA, 25 nt, Homo sapiens
  source 1..25: mol_type = unassigned RNA
agagaaagttcatcacacagacttt

SEQ ID NO: 2209 - RNA, 25 nt, Homo sapiens
  source 1..25: mol_type = unassigned RNA
agttcatcacacagactttgggcac

SEQ ID NO: 2210 - RNA, 25 nt, Homo sapiens
  source 1..25: mol_type = unassigned RNA
tcatcacacagactttgggcactgg

SEQ ID NO: 2211 - RNA, 25 nt, Homo sapiens
  source 1..25: mol_type = unassigned RNA
cacagactttgggcactggtggttt

SEQ ID NO: 2212 - RNA, 25 nt, Homo sapiens
  source 1..25: mol_type = unassigned RNA
tttaggtgccatccttctttgactg

SEQ ID NO: 2213 - RNA, 25 nt, Homo sapiens
  source 1..25: mol_type = unassigned RNA
ctgtggagattacgtccacatatta

SEQ ID NO: 2214 - RNA, 25 nt, Homo sapiens
  source 1..25: mol_type = unassigned RNA
tccacatattaaggtttctaatttc

SEQ ID NO: 2215 - RNA, 25 nt, Homo sapiens
  source 1..25: mol_type = unassigned RNA
ccacatattaaggtttctaatttct

SEQ ID NO: 2216 - RNA, 25 nt, Homo sapiens
  source 1..25: mol_type = unassigned RNA
ctcaactgcttctgttgccaagtct

SEQ ID NO: 2217 - RNA, 25 nt, Homo sapiens
  source 1..25: mol_type = unassigned RNA
aaaaataaaacaacaaaacctctac

SEQ ID NO: 2218 - RNA, 25 nt, Homo sapiens
  source 1..25: mol_type = unassigned RNA
aaagctattaattcgactttcttta

SEQ ID NO: 2219 - RNA, 25 nt, Homo sapiens
  source 1..25: mol_type = unassigned RNA
ttctttaaggcaaccattcttatta

SEQ ID NO: 2220 - RNA, 25 nt, Homo sapiens
  source 1..25: mol_type = unassigned RNA
ttttgatatttccatttgaatattt

SEQ ID NO: 2221 - RNA, 25 nt, Homo sapiens
  source 1..25: mol_type = unassigned RNA
ccatttgaatattttggtatctgat

SEQ ID NO: 2222 - RNA, 25 nt, Homo sapiens
  source 1..25: mol_type = unassigned RNA
ttggtgatgatttcagctaacatct

SEQ ID NO: 2223 - RNA, 25 nt, Homo sapiens
  source 1..25: mol_type = unassigned RNA
tggtgatgatttcagctaacatctc

SEQ ID NO: 2224 - RNA, 25 nt, Homo sapiens
  source 1..25: mol_type = unassigned RNA
ggtgatgatttcagctaacatctcg

SEQ ID NO: 2225 - RNA, 25 nt, Homo sapiens
  source 1..25: mol_type = unassigned RNA
aacatctcggggaattcaatactca

SEQ ID NO: 2226 - RNA, 25 nt, Homo sapiens
  source 1..25: mol_type = unassigned RNA
actcatggtcttatccaaaaatgtt

SEQ ID NO: 2227 - RNA, 25 nt, Homo sapiens
  source 1..25: mol_type = unassigned RNA
caaaaatgtttggaagcaatagtta

SEQ ID NO: 2228 - RNA, 25 nt, Homo sapiens
  source 1..25: mol_type = unassigned RNA
tttcaaccacctgcaagagaagata

SEQ ID NO: 2229 - RNA, 25 nt, Homo sapiens
  source 1..25: mol_type = unassigned RNA
tagccatttacagcaatgccaaata

SEQ ID NO: 2230 - RNA, 25 nt, Homo sapiens
  source 1..25: mol_type = unassigned RNA
accaaaccacacatttgtaccgaat

SEQ ID NO: 2231 - RNA, 25 nt, Homo sapiens
  source 1..25: mol_type = unassigned RNA
attttttcatttaaatttgctgttc

SEQ ID NO: 2232 - RNA, 25 nt, Homo sapiens
  source 1..25: mol_type = unassigned RNA
aaatgtcagactgtaaaaccttgtg

SEQ ID NO: 2233 - RNA, 25 nt, Homo sapiens
  source 1..25: mol_type = unassigned RNA
ggacaaatctatattatactgtgta

SEQ ID NO: 2234 - RNA, 25 nt, Homo sapiens
  source 1..25: mol_type = unassigned RNA
tttgtatattaaatgctatataatg

SEQ ID NO: 2235 - RNA, 25 nt, Homo sapiens
  source 1..25: mol_type = unassigned RNA
ttttgtatattaaatgctatataat

SEQ ID NO: 2236 - RNA, 25 nt, Homo sapiens
  source 1..25: mol_type = unassigned RNA
attttgtatattaaatgctatataa

SEQ ID NO: 2237 - RNA, 25 nt, Homo sapiens
  source 1..25: mol_type = unassigned RNA
tgaaaggattttattttctgatgaa

SEQ ID NO: 2238 - RNA, 25 nt, Homo sapiens
  source 1..25: mol_type = unassigned RNA
tgcttctctctagaaaatgtctgaa

SEQ ID NO: 2239 - RNA, 25 nt, Homo sapiens
  source 1..25: mol_type = unassigned RNA
ggattagtgaccaggttttcaggaa

SEQ ID NO: 2240 - RNA, 25 nt, Homo sapiens
  source 1..25: mol_type = unassigned RNA
acccaggattagtgaccaggttttc

SEQ ID NO: 2241 - RNA, 25 nt, Homo sapiens
  source 1..25: mol_type = unassigned RNA
cctggtccacccaggattagtgacc

SEQ ID NO: 2242 - RNA, 25 nt, Homo sapiens
  source 1..25: mol_type = unassigned RNA
tattttcaagcaacctggtccaccc

SEQ ID NO: 2243 - RNA, 25 nt, Homo sapiens
  source 1..25: mol_type = unassigned RNA
tttcccagactattttcaagcaacc

SEQ ID NO: 2244 - RNA, 25 nt, Homo sapiens
  source 1..25: mol_type = unassigned RNA
aggaggacactttaaaccctttggg

SEQ ID NO: 2245 - RNA, 25 nt, Homo sapiens
  source 1..25: mol_type = unassigned RNA
gtaaggaggacactttaaacccttt

SEQ ID NO: 2246 - RNA, 25 nt, Homo sapiens
  source 1..25: mol_type = unassigned RNA
tgtaaggaggacactttaaaccctt

SEQ ID NO: 2247 - RNA, 25 nt, Homo sapiens
  source 1..25: mol_type = unassigned RNA
tcagaagggaaataaaagtgtaagg

SEQ ID NO: 2248 - RNA, 25 nt, Homo sapiens
  source 1..25: mol_type = unassigned RNA
gtgtcagaagggaaataaaagtgta

SEQ ID NO: 2249 - RNA, 25 nt, Homo sapiens
  source 1..25: mol_type = unassigned RNA
acacacagacgttttagtgtcagaa

SEQ ID NO: 2250 - RNA, 25 nt, Homo sapiens
  source 1..25: mol_type = unassigned RNA
cacacacagacgttttagtgtcaga

SEQ ID NO: 2251 - RNA, 25 nt, Homo sapiens
  source 1..25: mol_type = unassigned RNA
ctggtcactccctgactgtagctgt

SEQ ID NO: 2252 - RNA, 25 nt, Homo sapiens
  source 1..25: mol_type = unassigned RNA
ccttcagtgagatttccatcttggc

SEQ ID NO: 2253 - RNA, 25 nt, Homo sapiens
  source 1..25: mol_type = unassigned RNA
gtagccttcagtgagatttccatct

SEQ ID NO: 2254 - RNA, 25 nt, Homo sapiens
  source 1..25: mol_type = unassigned RNA
ttgatctgtcaaacttccagaacca

SEQ ID NO: 2255 - RNA, 25 nt, Homo sapiens
  source 1..25: mol_type = unassigned RNA
aaaaaccctgaaaactacatcacca

SEQ ID NO: 2256 - RNA, 25 nt, Homo sapiens
  source 1..25: mol_type = unassigned RNA
acgctcccttcagaattcagaggca

SEQ ID NO: 2257 - RNA, 25 nt, Homo sapiens
  source 1..25: mol_type = unassigned RNA
cacgctcccttcagaattcagaggc

SEQ ID NO: 2258 - RNA, 25 nt, Homo sapiens
  source 1..25: mol_type = unassigned RNA
aagccacgctcccttcagaattcag

SEQ ID NO: 2259 - RNA, 25 nt, Homo sapiens
  source 1..25: mol_type = unassigned RNA
gggatgagctctgggcatgccatga

SEQ ID NO: 2260 - RNA, 25 nt, Homo sapiens
  source 1..25: mol_type = unassigned RNA
ggataattagcatgggatgagctct

SEQ ID NO: 2261 - RNA, 25 nt, Homo sapiens
  source 1..25: mol_type = unassigned RNA
tggataattagcatgggatgagctc

SEQ ID NO: 2262 - RNA, 25 nt, Homo sapiens
  source 1..25: mol_type = unassigned RNA
ctatgaagtgctggataattagcat

SEQ ID NO: 2263 - RNA, 25 nt, Homo sapiens
  source 1..25: mol_type = unassigned RNA
tctatgaagtgctggataattagca

SEQ ID NO: 2264 - RNA, 25 nt, Homo sapiens
  source 1..25: mol_type = unassigned RNA
aacatgatttgtgtctatgaagtgc

SEQ ID NO: 2265 - RNA, 25 nt, Homo sapiens
  source 1..25: mol_type = unassigned RNA
gggaggaaaccttggccaccccaaa

SEQ ID NO: 2266 - RNA, 25 nt, Homo sapiens
  source 1..25: mol_type = unassigned RNA
tgcctaaaactatgggaggaaacct

SEQ ID NO: 2267 - RNA, 25 nt, Homo sapiens
  source 1..25: mol_type = unassigned RNA
atatccaaatgcctaaaactatggg

SEQ ID NO: 2268 - RNA, 25 nt, Homo sapiens
  source 1..25: mol_type = unassigned RNA
tatatatccaaatgcctaaaactat

SEQ ID NO: 2269 - RNA, 25 nt, Homo sapiens
  source 1..25: mol_type = unassigned RNA
atatatatccaaatgcctaaaacta

SEQ ID NO: 2270 - RNA, 25 nt, Homo sapiens
  source 1..25: mol_type = unassigned RNA
aggcacttaggacataacacttttg

SEQ ID NO: 2271 - RNA, 25 nt, Homo sapiens
  source 1..25: mol_type = unassigned RNA
gaggcacttaggacataacactttt

SEQ ID NO: 2272 - RNA, 25 nt, Homo sapiens
  source 1..25: mol_type = unassigned RNA
tgaggcacttaggacataacacttt

SEQ ID NO: 2273 - RNA, 25 nt, Homo sapiens
  source 1..25: mol_type = unassigned RNA
ctatacaagcagaactgaggcactt

SEQ ID NO: 2274 - RNA, 25 nt, Homo sapiens
  source 1..25: mol_type = unassigned RNA
gtgggatactatacaagcagaactg

SEQ ID NO: 2275 - RNA, 25 nt, Homo sapiens
  source 1..25: mol_type = unassigned RNA
tttttagtgtttgtaggtattctgt

SEQ ID NO: 2276 - RNA, 25 nt, Homo sapiens
  source 1..25: mol_type = unassigned RNA
atttttagtgtttgtaggtattctg

SEQ ID NO: 2277 - RNA, 25 nt, Homo sapiens
  source 1..25: mol_type = unassigned RNA
cctgaaaagtatttttagtgtttgt

SEQ ID NO: 2278 - RNA, 25 nt, Homo sapiens
  source 1..25: mol_type = unassigned RNA
agtttgtagtaacttcagtgagagt

SEQ ID NO: 2279 - RNA, 25 nt, Homo sapiens
  source 1..25: mol_type = unassigned RNA
atttatttcctatgtatgtgttatc

SEQ ID NO: 2280 - RNA, 25 nt, Homo sapiens
  source 1..25: mol_type = unassigned RNA
aattgtggatttaagtgctatatgg

SEQ ID NO: 2281 - RNA, 25 nt, Homo sapiens
  source 1..25: mol_type = unassigned RNA
tttaattgtggatttaagtgctata

SEQ ID NO: 2282 - RNA, 25 nt, Homo sapiens
  source 1..25: mol_type = unassigned RNA
aagtcatcttaattatgtttaattg

SEQ ID NO: 2283 - RNA, 25 nt, Homo sapiens
  source 1..25: mol_type = unassigned RNA
agctgtgcccttttaggatacgtgg

SEQ ID NO: 2284 - RNA, 25 nt, Homo sapiens
  source 1..25: mol_type = unassigned RNA
aagctgtgcccttttaggatacgtg

SEQ ID NO: 2285 - RNA, 25 nt, Homo sapiens
  source 1..25: mol_type = unassigned RNA
gaagctgtgcccttttaggatacgt

SEQ ID NO: 2286 - RNA, 25 nt, Homo sapiens
  source 1..25: mol_type = unassigned RNA
agaagctgtgcccttttaggatacg

SEQ ID NO: 2287 - RNA, 25 nt, Homo sapiens
  source 1..25: mol_type = unassigned RNA
atgggaaaagaagctgtgccctttt

SEQ ID NO: 2288 - RNA, 25 nt, Homo sapiens
  source 1..25: mol_type = unassigned RNA
aactataggaggcttttcattaaat

SEQ ID NO: 2289 - RNA, 25 nt, Homo sapiens
  source 1..25: mol_type = unassigned RNA
caactataggaggcttttcattaaa

SEQ ID NO: 2290 - RNA, 25 nt, Homo sapiens
  source 1..25: mol_type = unassigned RNA
actgatgctcatcgacaactatagg

SEQ ID NO: 2291 - RNA, 25 nt, Homo sapiens
  source 1..25: mol_type = unassigned RNA
tcaactgatgctcatcgacaactat

SEQ ID NO: 2292 - RNA, 25 nt, Homo sapiens
  source 1..25: mol_type = unassigned RNA
aatctgattttcatcccaacaatct

SEQ ID NO: 2293 - RNA, 25 nt, Homo sapiens
  source 1..25: mol_type = unassigned RNA
tatcattcctttatagaatgttatg

SEQ ID NO: 2294 - RNA, 25 nt, Homo sapiens
  source 1..25: mol_type = unassigned RNA
tgtgtaacccggctggataaatttt

SEQ ID NO: 2295 - RNA, 25 nt, Homo sapiens
  source 1..25: mol_type = unassigned RNA
attttaagatggtgtgtaacccggc

SEQ ID NO: 2296 - RNA, 25 nt, Homo sapiens
  source 1..25: mol_type = unassigned RNA
taatattttaagatggtgtgtaacc

SEQ ID NO: 2297 - RNA, 25 nt, Homo sapiens
  source 1..25: mol_type = unassigned RNA
taaaagggaatgtaatattttaaga

SEQ ID NO: 2298 - RNA, 25 nt, Homo sapiens
  source 1..25: mol_type = unassigned RNA
tttgctttttgaatgctctctaaaa

SEQ ID NO: 2299 - RNA, 25 nt, Homo sapiens
  source 1..25: mol_type = unassigned RNA
atttgctttttgaatgctctctaaa

SEQ ID NO: 2300 - RNA, 25 nt, Homo sapiens
  source 1..25: mol_type = unassigned RNA
atgttatttgttattttcagtattt

SEQ ID NO: 2301 - RNA, 25 nt, Homo sapiens
  source 1..25: mol_type = unassigned RNA
caagagtttatttccaaataaaatg

SEQ ID NO: 2302 - RNA, 25 nt, Homo sapiens
  source 1..25: mol_type = unassigned RNA
atatgtaaatagtgcagaatctcat

SEQ ID NO: 2303 - RNA, 25 nt, Homo sapiens
  source 1..25: mol_type = unassigned RNA
agaagtttggcaatagtttgcatag

SEQ ID NO: 2304 - RNA, 25 nt, Homo sapiens
  source 1..25: mol_type = unassigned RNA
aatgacaacagaagcttcagaagtt

SEQ ID NO: 2305 - RNA, 25 nt, Homo sapiens
  source 1..25: mol_type = unassigned RNA
atccttaaaggcaccatctaatagc

SEQ ID NO: 2306 - RNA, 25 nt, Homo sapiens
  source 1..25: mol_type = unassigned RNA
catccttaaaggcaccatctaatag

SEQ ID NO: 2307 - RNA, 25 nt, Homo sapiens
  source 1..25: mol_type = unassigned RNA
aggaaggtggtgcttacatccttaa

SEQ ID NO: 2308 - RNA, 25 nt, Homo sapiens
  source 1..25: mol_type = unassigned RNA
agtatgtaaacaggagacaggaagg

SEQ ID NO: 2309 - RNA, 25 nt, Homo sapiens
  source 1..25: mol_type = unassigned RNA
taaagtatgtaaacaggagacagga

SEQ ID NO: 2310 - RNA, 25 nt, Homo sapiens
  source 1..25: mol_type = unassigned RNA
tatgtaaagtatgtaaacaggagac

SEQ ID NO: 2311 - RNA, 25 nt, Homo sapiens
  source 1..25: mol_type = unassigned RNA
actaaagtatgtaaagtatgtaaac

SEQ ID NO: 2312 - RNA, 25 nt, Homo sapiens
  source 1..25: mol_type = unassigned RNA
attccaacagtgagtctgtcagcgc

SEQ ID NO: 2313 - RNA, 25 nt, Homo sapiens
  source 1..25: mol_type = unassigned RNA
aggctctgacccagtgagattacag

SEQ ID NO: 2314 - RNA, 25 nt, Homo sapiens
  source 1..25: mol_type = unassigned RNA
gtcctgtgtgcagtgaaggttgctg

SEQ ID NO: 2315 - RNA, 25 nt, Homo sapiens
  source 1..25: mol_type = unassigned RNA
tggagactggtcctgtgtgcagtga

SEQ ID NO: 2316 - RNA, 25 nt, Homo sapiens
  source 1..25: mol_type = unassigned RNA
tctaggggaagagggagatggagac

SEQ ID NO: 2317 - RNA, 25 nt, Homo sapiens
  source 1..25: mol_type = unassigned RNA
agtttgctctaggggaagagggaga

SEQ ID NO: 2318 - RNA, 25 nt, Homo sapiens
  source 1..25: mol_type = unassigned RNA
ccaaacagtttgctctaggggaaga

SEQ ID NO: 2319 - RNA, 25 nt, Homo sapiens
  source 1..25: mol_type = unassigned RNA
accaaacagtttgctctaggggaag

SEQ ID NO: 2320 - RNA, 25 nt, Homo sapiens
  source 1..25: mol_type = unassigned RNA
tcagaaaccaaacagtttgctctag

SEQ ID NO: 2321 - RNA, 25 nt, Homo sapiens
  source 1..25: mol_type = unassigned RNA
ctcagaaaccaaacagtttgctcta

SEQ ID NO: 2322 - RNA, 25 nt, Homo sapiens
  source 1..25: mol_type = unassigned RNA
tctcagaaaccaaacagtttgctct

SEQ ID NO: 2323 - RNA, 25 nt, Homo sapiens
  source 1..25: mol_type = unassigned RNA
gtacatgcattcatacaggcagcga

SEQ ID NO: 2324 - RNA, 25 nt, Homo sapiens
  source 1..25: mol_type = unassigned RNA
ttatagtttgtacatgcattcatac

SEQ ID NO: 2325 - RNA, 25 nt, Homo sapiens
  source 1..25: mol_type = unassigned RNA
tttgtaggggtcaaagaaatgctga

SEQ ID NO: 2326 - RNA, 25 nt, Homo sapiens
  source 1..25: mol_type = unassigned RNA
atgacatgttatatattttttgtag

SEQ ID NO: 2327 - RNA, 25 nt, Homo sapiens
  source 1..25: mol_type = unassigned RNA
catgacatgttatatattttttgta

SEQ ID NO: 2328 - RNA, 25 nt, Homo sapiens
  source 1..25: mol_type = unassigned RNA
tcatgacatgttatatattttttgt

SEQ ID NO: 2329 - RNA, 25 nt, Homo sapiens
  source 1..25: mol_type = unassigned RNA
ccataacactaatctgggaagggaa

SEQ ID NO: 2330 - RNA, 25 nt, Homo sapiens
  source 1..25: mol_type = unassigned RNA
accataacactaatctgggaaggga

SEQ ID NO: 2331 - RNA, 25 nt, Homo sapiens
  source 1..25: mol_type = unassigned RNA
tataaccataacactaatctgggaa

SEQ ID NO: 2332 - RNA, 25 nt, Homo sapiens
  source 1..25: mol_type = unassigned RNA
gtataaccataacactaatctggga

SEQ ID NO: 2333 - RNA, 25 nt, Homo sapiens
  source 1..25: mol_type = unassigned RNA
tatagtataaccataacactaatct

SEQ ID NO: 2334 - RNA, 25 nt, Homo sapiens
  source 1..25: mol_type = unassigned RNA
atatagtataaccataacactaatc

SEQ ID NO: 2335 - RNA, 25 nt, Homo sapiens
  source 1..25: mol_type = unassigned RNA
aactgaaaatctaatattaaaaata

SEQ ID NO: 2336 - RNA, 25 nt, Homo sapiens
  source 1..25: mol_type = unassigned RNA
caagaaatttgatttctattcaagg

SEQ ID NO: 2337 - RNA, 25 nt, Homo sapiens
  source 1..25: mol_type = unassigned RNA
ccacaagaaatttgatttctattca

SEQ ID NO: 2338 - RNA, 25 nt, Homo sapiens
  source 1..25: mol_type = unassigned RNA
attggttaatctttcctgatggtac

SEQ ID NO: 2339 - RNA, 25 nt, Homo sapiens
  source 1..25: mol_type = unassigned RNA
tcaccaattggttaatctttcctga

SEQ ID NO: 2340 - RNA, 25 nt, Homo sapiens
  source 1..25: mol_type = unassigned RNA
tttcacattcccatctgtcaccaat

SEQ ID NO: 2341 - RNA, 25 nt, Homo sapiens
  source 1..25: mol_type = unassigned RNA
aactaaatctctaatatggcaaaaa

SEQ ID NO: 2342 - RNA, 25 nt, Homo sapiens
  source 1..25: mol_type = unassigned RNA
ttacccaaaaactaaatctctaata

SEQ ID NO: 2343 - RNA, 25 nt, Homo sapiens
  source 1..25: mol_type = unassigned RNA
aaagctggtaaactatttgtctttc

SEQ ID NO: 2344 - RNA, 25 nt, Homo sapiens
  source 1..25: mol_type = unassigned RNA
tgcaatggctatatggcaagaaagc

SEQ ID NO: 2345 - RNA, 25 nt, Homo sapiens
  source 1..25: mol_type = unassigned RNA
acgccctatttttgcaatggctata

SEQ ID NO: 2346 - RNA, 25 nt, Homo sapiens
  source 1..25: mol_type = unassigned RNA
tgtacctaacgccctatttttgcaa

SEQ ID NO: 2347 - RNA, 25 nt, Homo sapiens
  source 1..25: mol_type = unassigned RNA
actaatttaaaaaataactaccaag

SEQ ID NO: 2348 - RNA, 25 nt, Homo sapiens
  source 1..25: mol_type = unassigned RNA
gacctgctgggtaaactgtggatga

SEQ ID NO: 2349 - RNA, 25 nt, Homo sapiens
  source 1..25: mol_type = unassigned RNA
gtccagtgacctgctgggtaaactg

SEQ ID NO: 2350 - RNA, 25 nt, Homo sapiens
  source 1..25: mol_type = unassigned RNA
agagcacctagtccagtgacctgct

SEQ ID NO: 2351 - RNA, 25 nt, Homo sapiens
  source 1..25: mol_type = unassigned RNA
tagagcacctagtccagtgacctgc

SEQ ID NO: 2352 - RNA, 25 nt, Homo sapiens
  source 1..25: mol_type = unassigned RNA
ggttgtgcaaattaacagtcctaac

SEQ ID NO: 2353 - RNA, 25 nt, Homo sapiens
  source 1..25: mol_type = unassigned RNA
tatctgcttcagtggagaattatat

SEQ ID NO: 2354 - RNA, 25 nt, Homo sapiens
  source 1..25: mol_type = unassigned RNA
catattttgtatatatctgcttcag

SEQ ID NO: 2355 - RNA, 25 nt, Homo sapiens
  source 1..25: mol_type = unassigned RNA
aaatgggttggtgcttctaacctga

SEQ ID NO: 2356 - RNA, 25 nt, Homo sapiens
  source 1..25: mol_type = unassigned RNA
atcaatcatctgtgtgaaaatgggt

SEQ ID NO: 2357 - RNA, 25 nt, Homo sapiens
  source 1..25: mol_type = unassigned RNA
attaatcaatcatctgtgtgaaaat

SEQ ID NO: 2358 - RNA, 25 nt, Homo sapiens
  source 1..25: mol_type = unassigned RNA
cattaatcaatcatctgtgtgaaaa

SEQ ID NO: 2359 - RNA, 25 nt, Homo sapiens
  source 1..25: mol_type = unassigned RNA
aagttattgtacagctgtttaagat

SEQ ID NO: 2360 - RNA, 25 nt, Homo sapiens
  source 1..25: mol_type = unassigned RNA
caagttattgtacagctgtttaaga

SEQ ID NO: 2361 - RNA, 25 nt, Homo sapiens
  source 1..25: mol_type = unassigned RNA
tgtgccttttatagctattactgtc

SEQ ID NO: 2362 - RNA, 25 nt, Homo sapiens
  source 1..25: mol_type = unassigned RNA
aagtttacaagtgtatatcagaaaa

SEQ ID NO: 2363 - RNA, 25 nt, Homo sapiens
  source 1..25: mol_type = unassigned RNA
aaagtttacaagtgtatatcagaaa

SEQ ID NO: 2364 - RNA, 25 nt, Homo sapiens
  source 1..25: mol_type = unassigned RNA
taggatagcatttttgatttatgca

SEQ ID NO: 2365 - RNA, 25 nt, Homo sapiens
  source 1..25: mol_type = unassigned RNA
tggtgtatcccccccctgtatagtt

SEQ ID NO: 2366 - RNA, 25 nt, Homo sapiens
  source 1..25: mol_type = unassigned RNA
ggatgaaattttctagactttctgt

SEQ ID NO: 2367 - RNA, 25 nt, Homo sapiens
  source 1..25: mol_type = unassigned RNA
cttcatactttttttcacagttggc

SEQ ID NO: 2368 - RNA, 25 nt, Homo sapiens
  source 1..25: mol_type = unassigned RNA
ttctcttcatactttttttcacagt

SEQ ID NO: 2369 - RNA, 25 nt, Homo sapiens
  source 1..25: mol_type = unassigned RNA
cgtaatctccacagtcaaagaagga

SEQ ID NO: 2370 - RNA, 25 nt, Homo sapiens
  source 1..25: mol_type = unassigned RNA
tggacgtaatctccacagtcaaaga

SEQ ID NO: 2371 - RNA, 25 nt, Homo sapiens
  source 1..25: mol_type = unassigned RNA
cccagaaattagaaaccttaatatg

SEQ ID NO: 2372 - RNA, 25 nt, Homo sapiens
  source 1..25: mol_type = unassigned RNA
cacttttcagtgatgggagagtaga

SEQ ID NO: 2373 - RNA, 25 nt, Homo sapiens
  source 1..25: mol_type = unassigned RNA
tgagtcgtcatcacttttcagtgat

SEQ ID NO: 2374 - RNA, 25 nt, Homo sapiens
  source 1..25: mol_type = unassigned RNA
ttgagtcgtcatcacttttcagtga

SEQ ID NO: 2375 - RNA, 25 nt, Homo sapiens
  source 1..25: mol_type = unassigned RNA
atgtggtttatagagggccaagact

SEQ ID NO: 2376 - RNA, 25 nt, Homo sapiens
  source 1..25: mol_type = unassigned RNA
atacgcactacatgtggtttataga

SEQ ID NO: 2377 - RNA, 25 nt, Homo sapiens
  source 1..25: mol_type = unassigned RNA
aatacgcactacatgtggtttatag

SEQ ID NO: 2378 - RNA, 25 nt, Homo sapiens
  source 1..25: mol_type = unassigned RNA
ttttgttttaaatacgcactacatg

SEQ ID NO: 2379 - RNA, 25 nt, Homo sapiens
  source 1..25: mol_type = unassigned RNA
tataaactatcagtttgtcctgtag

SEQ ID NO: 2380 - RNA, 25 nt, Homo sapiens
  source 1..25: mol_type = unassigned RNA
tcaaaagtgactgccttaataagaa

SEQ ID NO: 2381 - RNA, 25 nt, Homo sapiens
  source 1..25: mol_type = unassigned RNA
ccaatcagataccaaaatattcaaa

SEQ ID NO: 2382 - RNA, 25 nt, Homo sapiens
  source 1..25: mol_type = unassigned RNA
cttaactattgcttccaaacatttt

SEQ ID NO: 2383 - RNA, 25 nt, Homo sapiens
  source 1..25: mol_type = unassigned RNA
tcattaccatatcttctcttgcagg

SEQ ID NO: 2384 - RNA, 25 nt, Homo sapiens
  source 1..25: mol_type = unassigned RNA
cagttgataaaaccgctgccagttc

SEQ ID NO: 2385 - RNA, 25 nt, Homo sapiens
  source 1..25: mol_type = unassigned RNA
tgataaaaccgctgccagttctggc

SEQ ID NO: 2386 - RNA, 25 nt, Homo sapiens
  source 1..25: mol_type = unassigned RNA
ctggagtttccttccctcttgacaa

SEQ ID NO: 2387 - RNA, 25 nt, Homo sapiens
  source 1..25: mol_type = unassigned RNA
atggcttttcctagctctttgatgt

SEQ ID NO: 2388 - RNA, 25 nt, Homo sapiens
  source 1..25: mol_type = unassigned RNA
cattctaatttcatcaaatagctct

SEQ ID NO: 2389 - RNA, 25 nt, Homo sapiens
  source 1..25: mol_type = unassigned RNA
gctcttggctcttcagaccgtcctt

SEQ ID NO: 2390 - RNA, 25 nt, Homo sapiens
  source 1..25: mol_type = unassigned RNA
cttcagaccgtccttaggaactaaa

SEQ ID NO: 2391 - RNA, 25 nt, Homo sapiens
  source 1..25: mol_type = unassigned RNA
cggttttatcaactgacaaaactct

SEQ ID NO: 2392 - RNA, 25 nt, Homo sapiens
  source 1..25: mol_type = unassigned RNA
aggaaactccagccagaactggcag

SEQ ID NO: 2393 - RNA, 25 nt, Homo sapiens
  source 1..25: mol_type = unassigned RNA
gagggaaggaaactccagccagaac

SEQ ID NO: 2394 - RNA, 25 nt, Homo sapiens
  source 1..25: mol_type = unassigned RNA
taggaaaagccattgtcaagaggga

SEQ ID NO: 2395 - RNA, 25 nt, Homo sapiens
  source 1..25: mol_type = unassigned RNA
gagctaggaaaagccattgtcaaga

SEQ ID NO: 2396 - RNA, 25 nt, Homo sapiens
  source 1..25: mol_type = unassigned RNA
agagctaggaaaagccattgtcaag

SEQ ID NO: 2397 - RNA, 25 nt, Homo sapiens
  source 1..25: mol_type = unassigned RNA
ttagaatgacctacatcaaagagct

SEQ ID NO: 2398 - RNA, 25 nt, Homo sapiens
  source 1..25: mol_type = unassigned RNA
atcttaaccttttagttcctaagga

SEQ ID NO: 2399 - RNA, 25 nt, Homo sapiens
  source 1..25: mol_type = unassigned RNA
cttcatcttaaccttttagttccta

SEQ ID NO: 2400 - RNA, 25 nt, Homo sapiens
  source 1..25: mol_type = unassigned RNA
taaacaagtaaagttgttagtatcc

SEQ ID NO: 2401 - RNA, 25 nt, Homo sapiens
  source 1..25: mol_type = unassigned RNA
atccaggcactgaattataccttca

SEQ ID NO: 2402 - RNA, 25 nt, Homo sapiens
  source 1..25: mol_type = unassigned RNA
acttctttaacaagtgtaccgctac

SEQ ID NO: 2403 - RNA, 25 nt, Homo sapiens
  source 1..25: mol_type = unassigned RNA
aaacgtctctagcaatgatctttat

SEQ ID NO: 2404 - RNA, 25 nt, Homo sapiens
  source 1..25: mol_type = unassigned RNA
aacgtctctagcaatgatctttatc

SEQ ID NO: 2405 - RNA, 25 nt, Homo sapiens
  source 1..25: mol_type = unassigned RNA
aaaacattaagatgaatgtgcgctt

SEQ ID NO: 2406 - RNA, 25 nt, Homo sapiens
  source 1..25: mol_type = unassigned RNA
gcaacatccatagcttacagttatt

SEQ ID NO: 2407 - RNA, 25 nt, Homo sapiens
  source 1..25: mol_type = unassigned RNA
gcaactatgaaaccacagttactaa

SEQ ID NO: 2408 - RNA, 25 nt, Homo sapiens
  source 1..25: mol_type = unassigned RNA
aaatgtacttatttgtatatgaaag

SEQ ID NO: 2409 - RNA, 25 nt, Homo sapiens
  source 1..25: mol_type = unassigned RNA
attgatatgtaatttttacttgaaa

SEQ ID NO: 2410 - RNA, 25 nt, Homo sapiens
  source 1..25: mol_type = unassigned RNA
tgtaatttttacttgaaatggccta

SEQ ID NO: 2411 - RNA, 25 nt, Homo sapiens
  source 1..25: mol_type = unassigned RNA
aatagtaattaagcacaccttttct

SEQ ID NO: 2412 - RNA, 25 nt, Homo sapiens
  source 1..25: mol_type = unassigned RNA
tttctcatacatgctaatactcatt

SEQ ID NO: 2413 - RNA, 25 nt, Homo sapiens
  source 1..25: mol_type = unassigned RNA
aatttttaaccaaataacagtgtag

SEQ ID NO: 2414 - RNA, 25 nt, Homo sapiens
  source 1..25: mol_type = unassigned RNA
atgtcttcccatgatcaaagatcaa

SEQ ID NO: 2415 - RNA, 25 nt, Homo sapiens
  source 1..25: mol_type = unassigned RNA
cttcccatgatcaaagatcaaagga

SEQ ID NO: 2416 - RNA, 25 nt, Homo sapiens
  source 1..25: mol_type = unassigned RNA
ccatgatcaaagatcaaaggaagga

SEQ ID NO: 2417 - RNA, 25 nt, Homo sapiens
  source 1..25: mol_type = unassigned RNA
ccatacctatttgtcttattaatct

SEQ ID NO: 2418 - RNA, 25 nt, Homo sapiens
  source 1..25: mol_type = unassigned RNA
cattcataaaaatcatctgactagt

SEQ ID NO: 2419 - RNA, 25 nt, Homo sapiens
  source 1..25: mol_type = unassigned RNA
gactagtaggaaataatagtagact

SEQ ID NO: 2420 - RNA, 25 nt, Homo sapiens
  source 1..25: mol_type = unassigned RNA
tgtatataaattaacctttgtttct

SEQ ID NO: 2421 - RNA, 25 nt, Homo sapiens
  source 1..25: mol_type = unassigned RNA
cttcatatttcatgcttttgacata

SEQ ID NO: 2422 - RNA, 25 nt, Homo sapiens
  source 1..25: mol_type = unassigned RNA
ttcatgcttttgacataaggtgaaa

SEQ ID NO: 2423 - RNA, 25 nt, Homo sapiens
  source 1..25: mol_type = unassigned RNA
taccaacctgaagagagaagcagta

SEQ ID NO: 2424 - RNA, 25 nt, Homo sapiens
  source 1..25: mol_type = unassigned RNA
gatacctgaagcctgtgtaactcag

SEQ ID NO: 2425 - RNA, 25 nt, Homo sapiens
  source 1..25: mol_type = unassigned RNA
ggaaacatacagcatgtgtttacat

SEQ ID NO: 2426 - RNA, 25 nt, Homo sapiens
  source 1..25: mol_type = unassigned RNA
atgtgtttacattggtcgtacatgc

SEQ ID NO: 2427 - RNA, 25 nt, Homo sapiens
  source 1..25: mol_type = unassigned RNA
tgtgtttacattggtcgtacatgca

SEQ ID NO: 2428 - RNA, 25 nt, Homo sapiens
  source 1..25: mol_type = unassigned RNA
tctctgcctgtgaaagataaatagc

SEQ ID NO: 2429 - RNA, 25 nt, Homo sapiens
  source 1..25: mol_type = unassigned RNA
ctctgcctgtgaaagataaatagca

SEQ ID NO: 2430 - RNA, 25 nt, Homo sapiens
  source 1..25: mol_type = unassigned RNA
ttgtttttttttttttttttttctt

SEQ ID NO: 2431 - RNA, 25 nt, Homo sapiens
  source 1..25: mol_type = unassigned RNA
taccatgaaggtataattcagtgcc

SEQ ID NO: 2432 - RNA, 25 nt, Homo sapiens
  source 1..25: mol_type = unassigned RNA
atcatagctttgattgataccatga

SEQ ID NO: 2433 - RNA, 25 nt, Homo sapiens
  source 1..25: mol_type = unassigned RNA
tagagacgtttaatgttacctgtag

SEQ ID NO: 2434 - RNA, 25 nt, Homo sapiens
  source 1..25: mol_type = unassigned RNA
agaagtattaataatatttcagtca

SEQ ID NO: 2435 - RNA, 25 nt, Homo sapiens
  source 1..25: mol_type = unassigned RNA
tcaacaaaaagttattttatgttaa

SEQ ID NO: 2436 - RNA, 25 nt, Homo sapiens
  source 1..25: mol_type = unassigned RNA
atagttgccaaataactgtaagcta

SEQ ID NO: 2437 - RNA, 25 nt, Homo sapiens
  source 1..25: mol_type = unassigned RNA
aaagtcttaattccattagtaactg

SEQ ID NO: 2438 - RNA, 25 nt, Homo sapiens
  source 1..25: mol_type = unassigned RNA
tgaactagttggtattataaacctt

SEQ ID NO: 2439 - RNA, 25 nt, Homo sapiens
  source 1..25: mol_type = unassigned RNA
aaattttaaagctctatgaactagt

SEQ ID NO: 2440 - RNA, 25 nt, Homo sapiens
  source 1..25: mol_type = unassigned RNA
tgtcagagattcattatctagaaaa

SEQ ID NO: 2441 - RNA, 25 nt, Homo sapiens
  source 1..25: mol_type = unassigned RNA
ggattggttaacatagcatgggagc

SEQ ID NO: 2442 - RNA, 25 nt, Homo sapiens
  source 1..25: mol_type = unassigned RNA
tattggggattggttaacatagcat

SEQ ID NO: 2443 - RNA, 25 nt, Homo sapiens
  source 1..25: mol_type = unassigned RNA
ctattggggattggttaacatagca

SEQ ID NO: 2444 - RNA, 25 nt, Homo sapiens
  source 1..25: mol_type = unassigned RNA
ggtgtgcttaattactattggggat

SEQ ID NO: 2445 - RNA, 25 nt, Homo sapiens
  source 1..25: mol_type = unassigned RNA
gaaaaggtgtgcttaattactattg

SEQ ID NO: 2446 - RNA, 25 nt, Homo sapiens
  source 1..25: mol_type = unassigned RNA
agaaaaggtgtgcttaattactatt

SEQ ID NO: 2447 - RNA, 25 nt, Homo sapiens
  source 1..25: mol_type = unassigned RNA
tagaaaaggtgtgcttaattactat

SEQ ID NO: 2448 - RNA, 25 nt, Homo sapiens
  source 1..25: mol_type = unassigned RNA
gggagaaaaaggcgcatcctagaaa

SEQ ID NO: 2449 - RNA, 25 nt, Homo sapiens
  source 1..25: mol_type = unassigned RNA
atgtatgagaaattatgggagaaaa

SEQ ID NO: 2450 - RNA, 25 nt, Homo sapiens
  source 1..25: mol_type = unassigned RNA
agtattagcatgtatgagaaattat

SEQ ID NO: 2451 - RNA, 25 nt, Homo sapiens
  source 1..25: mol_type = unassigned RNA
gagtattagcatgtatgagaaatta

SEQ ID NO: 2452 - RNA, 25 nt, Homo sapiens
  source 1..25: mol_type = unassigned RNA
tgattttgtccactacactgttatt

SEQ ID NO: 2453 - RNA, 25 nt, Homo sapiens
  source 1..25: mol_type = unassigned RNA
tttgatctttgatcatgggaagaca

SEQ ID NO: 2454 - RNA, 25 nt, Homo sapiens
  source 1..25: mol_type = unassigned RNA
cttccttcctttgatctttgatcat

SEQ ID NO: 2455 - RNA, 25 nt, Homo sapiens
  source 1..25: mol_type = unassigned RNA
ccttccttcctttgatctttgatca

SEQ ID NO: 2456 - RNA, 25 nt, Homo sapiens
  source 1..25: mol_type = unassigned RNA
aacagagaggtatatgagctgcata

SEQ ID NO: 2457 - RNA, 25 nt, Homo sapiens
  source 1..25: mol_type = unassigned RNA
aaacagagaggtatatgagctgcat

SEQ ID NO: 2458 - RNA, 25 nt, Homo sapiens
  source 1..25: mol_type = unassigned RNA
acaaataggtatggcagaaacagag

SEQ ID NO: 2459 - RNA, 25 nt, Homo sapiens
  source 1..25: mol_type = unassigned RNA
ccaagattaataagacaaataggta

SEQ ID NO: 2460 - RNA, 25 nt, Homo sapiens
  source 1..25: mol_type = unassigned RNA
tgacaccaagattaataagacaaat

SEQ ID NO: 2461 - RNA, 25 nt, Homo sapiens
  source 1..25: mol_type = unassigned RNA
tttttatgaatgtaaaatattagaa

SEQ ID NO: 2462 - RNA, 25 nt, Homo sapiens
  source 1..25: mol_type = unassigned RNA
atgaaatatgaaggcctagaaacaa

SEQ ID NO: 2463 - RNA, 25 nt, Homo sapiens
  source 1..25: mol_type = unassigned RNA
cttatgtcaaaagcatgaaatatga

SEQ ID NO: 2464 - RNA, 25 nt, Homo sapiens
  source 1..25: mol_type = unassigned RNA
aaccttactgcttctctcttcaggt

SEQ ID NO: 2465 - RNA, 25 nt, Homo sapiens
  source 1..25: mol_type = unassigned RNA
tgaaaaccttactgcttctctcttc

SEQ ID NO: 2466 - RNA, 25 nt, Homo sapiens
  source 1..25: mol_type = unassigned RNA
gtttcctctgagttacacaggcttc

SEQ ID NO: 2467 - RNA, 25 nt, Homo sapiens
  source 1..25: mol_type = unassigned RNA
gctgtatgtttcctctgagttacac

SEQ ID NO: 2468 - RNA, 25 nt, Homo sapiens
  source 1..25: mol_type = unassigned RNA
caacttactcattaataatcagatc

SEQ ID NO: 2469 - RNA, 25 nt, Homo sapiens
  source 1..25: mol_type = unassigned RNA
aatcagatcaggagcaaaacacagc

SEQ ID NO: 2470 - RNA, 25 nt, Homo sapiens
  source 1..25: mol_type = unassigned RNA
agagcaaatgccataagaaacatcc

SEQ ID NO: 2471 - RNA, 25 nt, Homo sapiens
  source 1..25: mol_type = unassigned RNA
aagaaacatccaggagtactgcagt

SEQ ID NO: 2472 - RNA, 25 nt, Homo sapiens
  source 1..25: mol_type = unassigned RNA
agaaacatccaggagtactgcagta

SEQ ID NO: 2473 - RNA, 25 nt, Homo sapiens
  source 1..25: mol_type = unassigned RNA
ccaggagtactgcagtagggtcatt

SEQ ID NO: 2474 - RNA, 25 nt, Homo sapiens
  source 1..25: mol_type = unassigned RNA
ctgcagtagggtcatttggtcatcc

SEQ ID NO: 2475 - RNA, 25 nt, Homo sapiens
  source 1..25: mol_type = unassigned RNA
ctgaaacctgaattaagagaaataa

SEQ ID NO: 2476 - RNA, 25 nt, Homo sapiens
  source 1..25: mol_type = unassigned RNA
gtttcttatggcatttgctctgggg

SEQ ID NO: 2477 - RNA, 25 nt, Homo sapiens
  source 1..25: mol_type = unassigned RNA
gatgtttcttatggcatttgctctg

SEQ ID NO: 2478 - RNA, 25 nt, Homo sapiens
  source 1..25: mol_type = unassigned RNA
ggatgtttcttatggcatttgctct

SEQ ID NO: 2479 - RNA, 25 nt, Homo sapiens
  source 1..25: mol_type = unassigned RNA
tggatgtttcttatggcatttgctc

SEQ ID NO: 2480 - RNA, 25 nt, Homo sapiens
  source 1..25: mol_type = unassigned RNA
ctgcagtactcctggatgtttctta

SEQ ID NO: 2481 - RNA, 25 nt, Homo sapiens
  source 1..25: mol_type = unassigned RNA
ccaaatgaccctactgcagtactcc

SEQ ID NO: 2482 - RNA, 25 nt, Homo sapiens
  source 1..25: mol_type = unassigned RNA
aattcaggtttcaggaacttacacc

SEQ ID NO: 2483 - RNA, 25 nt, Homo sapiens
  source 1..25: mol_type = unassigned RNA
ctttatttctcttaattcaggtttc

SEQ ID NO: 2484 - RNA, 25 nt, Homo sapiens
  source 1..25: mol_type = unassigned RNA
gctcttttatgttttgcatcttacc

SEQ ID NO: 2485 - RNA, 25 nt, Homo sapiens
  source 1..25: mol_type = unassigned RNA
tagtcatgatcctccaagttgagtc

SEQ ID NO: 2486 - RNA, 25 nt, Homo sapiens
  source 1..25: mol_type = unassigned RNA
tatcatatcctgcatataacacttc

SEQ ID NO: 2487 - RNA, 25 nt, Homo sapiens
  source 1..25: mol_type = unassigned RNA
ttcaataacctccaacagtgacacc

SEQ ID NO: 2488 - RNA, 25 nt, Homo sapiens
  source 1..25: mol_type = unassigned RNA
tcaataacctccaacagtgacacca

SEQ ID NO: 2489 - RNA, 25 nt, Homo sapiens
  source 1..25: mol_type = unassigned RNA
taacctccaacagtgacaccagggt

SEQ ID NO: 2490 - RNA, 25 nt, Homo sapiens
  source 1..25: mol_type = unassigned RNA
aacctccaacagtgacaccagggta

SEQ ID NO: 2491 - RNA, 25 nt, Homo sapiens
  source 1..25: mol_type = unassigned RNA
acctccaacagtgacaccagggtag

SEQ ID NO: 2492 - RNA, 25 nt, Homo sapiens
  source 1..25: mol_type = unassigned RNA
gtgacaccagggtaggggtgagttg

SEQ ID NO: 2493 - RNA, 25 nt, Homo sapiens
  source 1..25: mol_type = unassigned RNA
taggggtgagttgtggtaacgttgc

SEQ ID NO: 2494 - RNA, 25 nt, Homo sapiens
  source 1..25: mol_type = unassigned RNA
ttgcaggaactattgttttgttacc

SEQ ID NO: 2495 - RNA, 25 nt, Homo sapiens
  source 1..25: mol_type = unassigned RNA
attgttttgttaccaggattttcag

SEQ ID NO: 2496 - RNA, 25 nt, Homo sapiens
  source 1..25: mol_type = unassigned RNA
gaggtttcttgtgagactcctgtag

SEQ ID NO: 2497 - RNA, 25 nt, Homo sapiens
  source 1..25: mol_type = unassigned RNA
atttttttctttgtttttcgagctg

SEQ ID NO: 2498 - RNA, 25 nt, Homo sapiens
  source 1..25: mol_type = unassigned RNA
tttttttctttgtttttcgagctgt

SEQ ID NO: 2499 - RNA, 25 nt, Homo sapiens
  source 1..25: mol_type = unassigned RNA
cagtgaaatgggcaaaggcaatacc

SEQ ID NO: 2500 - RNA, 25 nt, Homo sapiens
  source 1..25: mol_type = unassigned RNA
gtgattgcagcagtgaaatgggcaa

SEQ ID NO: 2501 - RNA, 25 nt, Homo sapiens
  source 1..25: mol_type = unassigned RNA
cggcaagtgattgcagcagtgaaat

SEQ ID NO: 2502 - RNA, 25 nt, Homo sapiens
  source 1..25: mol_type = unassigned RNA
gcggcaagtgattgcagcagtgaaa

SEQ ID NO: 2503 - RNA, 25 nt, Homo sapiens
  source 1..25: mol_type = unassigned RNA
gactacgctcaacatgttaggaggg

SEQ ID NO: 2504 - RNA, 25 nt, Homo sapiens
  source 1..25: mol_type = unassigned RNA
catgactacgctcaacatgttagga

SEQ ID NO: 2505 - RNA, 25 nt, Homo sapiens
  source 1..25: mol_type = unassigned RNA
tcatgactacgctcaacatgttagg

SEQ ID NO: 2506 - RNA, 25 nt, Homo sapiens
  source 1..25: mol_type = unassigned RNA
ggatcatgactacgctcaacatgtt

SEQ ID NO: 2507 - RNA, 25 nt, Homo sapiens
  source 1..25: mol_type = unassigned RNA
tagctctgttccagactcaacttgg

SEQ ID NO: 2508 - RNA, 25 nt, Homo sapiens
  source 1..25: mol_type = unassigned RNA
tgatagctctgttccagactcaact

SEQ ID NO: 2509 - RNA, 25 nt, Homo sapiens
  source 1..25: mol_type = unassigned RNA
ttattgaacctgaagtgttatatgc

SEQ ID NO: 2510 - RNA, 25 nt, Homo sapiens
  source 1..25: mol_type = unassigned RNA
acccctaccctggtgtcactgttgg

SEQ ID NO: 2511 - RNA, 25 nt, Homo sapiens
  source 1..25: mol_type = unassigned RNA
ctcacccctaccctggtgtcactgt

SEQ ID NO: 2512 - RNA, 25 nt, Homo sapiens
  source 1..25: mol_type = unassigned RNA
acgttaccacaactcacccctaccc

SEQ ID NO: 2513 - RNA, 25 nt, Homo sapiens
  source 1..25: mol_type = unassigned RNA
tctcacaagaaacctctgaaaatcc

SEQ ID NO: 2514 - RNA, 25 nt, Homo sapiens
  source 1..25: mol_type = unassigned RNA
taaaaggaattcagcaggccactac

SEQ ID NO: 2515 - RNA, 25 nt, Homo sapiens
  source 1..25: mol_type = unassigned RNA
aagaaaaaaataaaaggaattcagc

SEQ ID NO: 2516 - RNA, 25 nt, Homo sapiens
  source 1..25: mol_type = unassigned RNA
ctcgaaaaacaaagaaaaaaataaa

SEQ ID NO: 2517 - RNA, 25 nt, Homo sapiens
  source 1..25: mol_type = unassigned RNA
ctttcagatatttatattaccttcc

SEQ ID NO: 2518 - RNA, 25 nt, Homo sapiens
  source 1..25: mol_type = unassigned RNA
tccagcctgaagacattttcgatag

SEQ ID NO: 2519 - RNA, 25 nt, Homo sapiens
  source 1..25: mol_type = unassigned RNA
gaagacattttcgatagcggcatgc

SEQ ID NO: 2520 - RNA, 25 nt, Homo sapiens
  source 1..25: mol_type = unassigned RNA
aagacattttcgatagcggcatgct

SEQ ID NO: 2521 - RNA, 25 nt, Homo sapiens
  source 1..25: mol_type = unassigned RNA
gatgcaatcattccttccagcacat

SEQ ID NO: 2522 - RNA, 25 nt, Homo sapiens
  source 1..25: mol_type = unassigned RNA
acataggtaattgtgctgtcctata

SEQ ID NO: 2523 - RNA, 25 nt, Homo sapiens
  source 1..25: mol_type = unassigned RNA
attgtgctgtcctatatggaataaa

SEQ ID NO: 2524 - RNA, 25 nt, Homo sapiens
  source 1..25: mol_type = unassigned RNA
gtcttcaggctggaatgaacctgga

SEQ ID NO: 2525 - RNA, 25 nt, Homo sapiens
  source 1..25: mol_type = unassigned RNA
aaatgtcttcaggctggaatgaacc

SEQ ID NO: 2526 - RNA, 25 nt, Homo sapiens
  source 1..25: mol_type = unassigned RNA
gccgctatcgaaaatgtcttcaggc

SEQ ID NO: 2527 - RNA, 25 nt, Homo sapiens
  source 1..25: mol_type = unassigned RNA
gcatgccgctatcgaaaatgtcttc

SEQ ID NO: 2528 - RNA, 25 nt, Homo sapiens
  source 1..25: mol_type = unassigned RNA
acagcacaattacctatgtgctgga

SEQ ID NO: 2529 - RNA, 25 nt, Homo sapiens
  source 1..25: mol_type = unassigned RNA
taggacagcacaattacctatgtgc

SEQ ID NO: 2530 - RNA, 25 nt, Homo sapiens
  source 1..25: mol_type = unassigned RNA
tcctgaagcttcatcagagcacacc

SEQ ID NO: 2531 - RNA, 25 nt, Homo sapiens
  source 1..25: mol_type = unassigned RNA
tcatcagagcacaccaggcagagtt

SEQ ID NO: 2532 - RNA, 25 nt, Homo sapiens
  source 1..25: mol_type = unassigned RNA
catcagagcacaccaggcagagttt

SEQ ID NO: 2533 - RNA, 25 nt, Homo sapiens
  source 1..25: mol_type = unassigned RNA
cagagcacaccaggcagagtttggg

SEQ ID NO: 2534 - RNA, 25 nt, Homo sapiens
  source 1..25: mol_type = unassigned RNA
agcacaccaggcagagtttgggagg

SEQ ID NO: 2535 - RNA, 25 nt, Homo sapiens
  source 1..25: mol_type = unassigned RNA
ggaggtggtcctgttgttgctgttg

SEQ ID NO: 2536 - RNA, 25 nt, Homo sapiens
  source 1..25: mol_type = unassigned RNA
ggtcctgttgttgctgttgaggagc

SEQ ID NO: 2537 - RNA, 25 nt, Homo sapiens
  source 1..25: mol_type = unassigned RNA
ctgttgttgctgttgaggagctgga

SEQ ID NO: 2538 - RNA, 25 nt, Homo sapiens
  source 1..25: mol_type = unassigned RNA
ttgttgctgttgaggagctggatgg

SEQ ID NO: 2539 - RNA, 25 nt, Homo sapiens
  source 1..25: mol_type = unassigned RNA
agctggatggaggagagcttacatc

SEQ ID NO: 2540 - RNA, 25 nt, Homo sapiens
  source 1..25: mol_type = unassigned RNA
ggagagcttacatctggtctcatgc

SEQ ID NO: 2541 - RNA, 25 nt, Homo sapiens
  source 1..25: mol_type = unassigned RNA
gagagcttacatctggtctcatgct

SEQ ID NO: 2542 - RNA, 25 nt, Homo sapiens
  source 1..25: mol_type = unassigned RNA
agagcttacatctggtctcatgctg

SEQ ID NO: 2543 - RNA, 25 nt, Homo sapiens
  source 1..25: mol_type = unassigned RNA
tctggtctcatgctggggctaaaga

SEQ ID NO: 2544 - RNA, 25 nt, Homo sapiens
  source 1..25: mol_type = unassigned RNA
ctggtctcatgctggggctaaagaa

SEQ ID NO: 2545 - RNA, 25 nt, Homo sapiens
  source 1..25: mol_type = unassigned RNA
tggtctcatgctggggctaaagaag

SEQ ID NO: 2546 - RNA, 25 nt, Homo sapiens
  source 1..25: mol_type = unassigned RNA
aagttttcttcaaaagagcagtgga

SEQ ID NO: 2547 - RNA, 25 nt, Homo sapiens
  source 1..25: mol_type = unassigned RNA
tgtaaagttttcttcaaaagagcag

SEQ ID NO: 2548 - RNA, 25 nt, Homo sapiens
  source 1..25: mol_type = unassigned RNA
gatgtcattatggagtcttaacttg

SEQ ID NO: 2549 - RNA, 25 nt, Homo sapiens
  source 1..25: mol_type = unassigned RNA
ctgatgaagcttcaggatgtcatta

SEQ ID NO: 2550 - RNA, 25 nt, Homo sapiens
  source 1..25: mol_type = unassigned RNA
gcctggtgtgctctgatgaagcttc

SEQ ID NO: 2551 - RNA, 25 nt, Homo sapiens
  source 1..25: mol_type = unassigned RNA
acaggaccacctcccaaactctgcc

SEQ ID NO: 2552 - RNA, 25 nt, Homo sapiens
  source 1..25: mol_type = unassigned RNA
catccagctcctcaacagcaacaac

SEQ ID NO: 2553 - RNA, 25 nt, Homo sapiens
  source 1..25: mol_type = unassigned RNA
agccattagaaaaaactgttcgacc

SEQ ID NO: 2554 - RNA, 25 nt, Homo sapiens
  source 1..25: mol_type = unassigned RNA
gccattagaaaaaactgttcgacca

SEQ ID NO: 2555 - RNA, 25 nt, Homo sapiens
  source 1..25: mol_type = unassigned RNA
agtcaagttgtcatctccagatcct

SEQ ID NO: 2556 - RNA, 25 nt, Homo sapiens
  source 1..25: mol_type = unassigned RNA
gatccttggcacctattccaatttt

SEQ ID NO: 2557 - RNA, 25 nt, Homo sapiens
  source 1..25: mol_type = unassigned RNA
cacctattccaattttcggaaccaa

SEQ ID NO: 2558 - RNA, 25 nt, Homo sapiens
  source 1..25: mol_type = unassigned RNA
acctattccaattttcggaaccaac

SEQ ID NO: 2559 - RNA, 25 nt, Homo sapiens
  source 1..25: mol_type = unassigned RNA
tccaattttcggaaccaacgggaat

SEQ ID NO: 2560 - RNA, 25 nt, Homo sapiens
  source 1..25: mol_type = unassigned RNA
aattttcggaaccaacgggaattgg

SEQ ID NO: 2561 - RNA, 25 nt, Homo sapiens
  source 1..25: mol_type = unassigned RNA
gaattggtggaatgacattaaaaat

SEQ ID NO: 2562 - RNA, 25 nt, Homo sapiens
  source 1..25: mol_type = unassigned RNA
aggcttctgatcctgctgttgagaa

SEQ ID NO: 2563 - RNA, 25 nt, Homo sapiens
  source 1..25: mol_type = unassigned RNA
ggcttctgatcctgctgttgagaaa

SEQ ID NO: 2564 - RNA, 25 nt, Homo sapiens
  source 1..25: mol_type = unassigned RNA
aagggatgctgtattcatgtcatag

SEQ ID NO: 2565 - RNA, 25 nt, Homo sapiens
  source 1..25: mol_type = unassigned RNA
tcatagtggtacatctgtcctccag

SEQ ID NO: 2566 - RNA, 25 nt, Homo sapiens
  source 1..25: mol_type = unassigned RNA
gaggtactcacaccatgaacagaaa

SEQ ID NO: 2567 - RNA, 25 nt, Homo sapiens
  source 1..25: mol_type = unassigned RNA
ttttattaccaattatatttgctcc

SEQ ID NO: 2568 - RNA, 25 nt, Homo sapiens
  source 1..25: mol_type = unassigned RNA
ccagtttctcttgcttaattacccc

SEQ ID NO: 2569 - RNA, 25 nt, Homo sapiens
  source 1..25: mol_type = unassigned RNA
cagtttctcttgcttaattacccca

SEQ ID NO: 2570 - RNA, 25 nt, Homo sapiens
  source 1..25: mol_type = unassigned RNA
agtttctcttgcttaattaccccag

SEQ ID NO: 2571 - RNA, 25 nt, Homo sapiens
  source 1..25: mol_type = unassigned RNA
gaaatcttctttttctgttttcact

SEQ ID NO: 2572 - RNA, 25 nt, Homo sapiens
  source 1..25: mol_type = unassigned RNA
aaatcttctttttctgttttcactt

SEQ ID NO: 2573 - RNA, 25 nt, Homo sapiens
  source 1..25: mol_type = unassigned RNA
aatcttctttttctgttttcacttg

SEQ ID NO: 2574 - RNA, 25 nt, Homo sapiens
  source 1..25: mol_type = unassigned RNA
ttcacttggggcagtgttacattac

SEQ ID NO: 2575 - RNA, 25 nt, Homo sapiens
  source 1..25: mol_type = unassigned RNA
tcacttggggcagtgttacattact

SEQ ID NO: 2576 - RNA, 25 nt, Homo sapiens
  source 1..25: mol_type = unassigned RNA
cacttggggcagtgttacattactg

SEQ ID NO: 2577 - RNA, 25 nt, Homo sapiens
  source 1..25: mol_type = unassigned RNA
accagatctccattatccttaattt

SEQ ID NO: 2578 - RNA, 25 nt, Homo sapiens
  source 1..25: mol_type = unassigned RNA
ccagatctccattatccttaatttt

SEQ ID NO: 2579 - RNA, 25 nt, Homo sapiens
  source 1..25: mol_type = unassigned RNA
tatccttaattttgggtttagtgtc

SEQ ID NO: 2580 - RNA, 25 nt, Homo sapiens
  source 1..25: mol_type = unassigned RNA
tgggtttagtgtccggtaaaatgag

SEQ ID NO: 2581 - RNA, 25 nt, Homo sapiens
  source 1..25: mol_type = unassigned RNA
gtcctcattcgagtttccttccaaa

SEQ ID NO: 2582 - RNA, 25 nt, Homo sapiens
  source 1..25: mol_type = unassigned RNA
ggaatgaatcgtcttctcccgccag

SEQ ID NO: 2583 - RNA, 25 nt, Homo sapiens
  source 1..25: mol_type = unassigned RNA
aagcaaacagttttcatctatcaac

SEQ ID NO: 2584 - RNA, 25 nt, Homo sapiens
  source 1..25: mol_type = unassigned RNA
catctatcaacaggtctgatctcca

SEQ ID NO: 2585 - RNA, 25 nt, Homo sapiens
  source 1..25: mol_type = unassigned RNA
aaggactctcattcgtctctttacc

SEQ ID NO: 2586 - RNA, 25 nt, Homo sapiens
  source 1..25: mol_type = unassigned RNA
aggactctcattcgtctctttacct

SEQ ID NO: 2587 - RNA, 25 nt, Homo sapiens
  source 1..25: mol_type = unassigned RNA
ggactctcattcgtctctttacctg

SEQ ID NO: 2588 - RNA, 25 nt, Homo sapiens
  source 1..25: mol_type = unassigned RNA
aactccaaatcctgcaaaatgtcaa

SEQ ID NO: 2589 - RNA, 25 nt, Homo sapiens
  source 1..25: mol_type = unassigned RNA
atcctgcaaaatgtcaaaggtgctt

SEQ ID NO: 2590 - RNA, 25 nt, Homo sapiens
  source 1..25: mol_type = unassigned RNA
aaaatgtcaaaggtgctttggtctg

SEQ ID NO: 2591 - RNA, 25 nt, Homo sapiens
  source 1..25: mol_type = unassigned RNA
gtatacaatttcacattgccaccgt

SEQ ID NO: 2592 - RNA, 25 nt, Homo sapiens
  source 1..25: mol_type = unassigned RNA
cacattgccaccgttggtgccagtc

SEQ ID NO: 2593 - RNA, 25 nt, Homo sapiens
  source 1..25: mol_type = unassigned RNA
ctgaagatacatcagagtgagtttt

SEQ ID NO: 2594 - RNA, 25 nt, Homo sapiens
  source 1..25: mol_type = unassigned RNA
tgagtttttggaaactccttctctg

SEQ ID NO: 2595 - RNA, 25 nt, Homo sapiens
  source 1..25: mol_type = unassigned RNA
gagtttttggaaactccttctctgt

SEQ ID NO: 2596 - RNA, 25 nt, Homo sapiens
  source 1..25: mol_type = unassigned RNA
agtttttggaaactccttctctgtg

SEQ ID NO: 2597 - RNA, 25 nt, Homo sapiens
  source 1..25: mol_type = unassigned RNA
gtttttggaaactccttctctgtgg

SEQ ID NO: 2598 - RNA, 25 nt, Homo sapiens
  source 1..25: mol_type = unassigned RNA
tctgtgggggcagcagacacagcag

SEQ ID NO: 2599 - RNA, 25 nt, Homo sapiens
  source 1..25: mol_type = unassigned RNA
gacacagcagtggatgctgaactct

SEQ ID NO: 2600 - RNA, 25 nt, Homo sapiens
  source 1..25: mol_type = unassigned RNA
acacagcagtggatgctgaactctt

SEQ ID NO: 2601 - RNA, 25 nt, Homo sapiens
  source 1..25: mol_type = unassigned RNA
cacagcagtggatgctgaactcttg

SEQ ID NO: 2602 - RNA, 25 nt, Homo sapiens
  source 1..25: mol_type = unassigned RNA
tggatgctgaactcttggggttctc

SEQ ID NO: 2603 - RNA, 25 nt, Homo sapiens
  source 1..25: mol_type = unassigned RNA
gaactcttggggttctctggaacac

SEQ ID NO: 2604 - RNA, 25 nt, Homo sapiens
  source 1..25: mol_type = unassigned RNA
ctctggaacactggtcgacctattg

SEQ ID NO: 2605 - RNA, 25 nt, Homo sapiens
  source 1..25: mol_type = unassigned RNA
aaaagctttaagtctgtttcccccg

SEQ ID NO: 2606 - RNA, 25 nt, Homo sapiens
  source 1..25: mol_type = unassigned RNA
ctttaagtctgtttcccccgaggaa

SEQ ID NO: 2607 - RNA, 25 nt, Homo sapiens
  source 1..25: mol_type = unassigned RNA
tgtttcccccgaggaaaggctgatt

SEQ ID NO: 2608 - RNA, 25 nt, Homo sapiens
  source 1..25: mol_type = unassigned RNA
aggaaaggctgatttggccctgctg

SEQ ID NO: 2609 - RNA, 25 nt, Homo sapiens
  source 1..25: mol_type = unassigned RNA
ggaaaggctgatttggccctgctgt

SEQ ID NO: 2610 - RNA, 25 nt, Homo sapiens
  source 1..25: mol_type = unassigned RNA
gatttggccctgctgtgggaatccc

SEQ ID NO: 2611 - RNA, 25 nt, Homo sapiens
  source 1..25: mol_type = unassigned RNA
agtcccattgagagtgaaactgctt

SEQ ID NO: 2612 - RNA, 25 nt, Homo sapiens
  source 1..25: mol_type = unassigned RNA
agagtgaaactgctttggacagatc

SEQ ID NO: 2613 - RNA, 25 nt, Homo sapiens
  source 1..25: mol_type = unassigned RNA
gctgcgcattgcttactgagccttt

SEQ ID NO: 2614 - RNA, 25 nt, Homo sapiens
  source 1..25: mol_type = unassigned RNA
aaatcaaccaaaagtcttcgctgct

SEQ ID NO: 2615 - RNA, 25 nt, Homo sapiens
  source 1..25: mol_type = unassigned RNA
tctgattgagaagcgacagccagtg

SEQ ID NO: 2616 - RNA, 25 nt, Homo sapiens
  source 1..25: mol_type = unassigned RNA
ctgattgagaagcgacagccagtga

SEQ ID NO: 2617 - RNA, 25 nt, Homo sapiens
  source 1..25: mol_type = unassigned RNA
aaccttcacagtagctcctcctctt

SEQ ID NO: 2618 - RNA, 25 nt, Homo sapiens
  source 1..25: mol_type = unassigned RNA
accttcacagtagctcctcctctta

SEQ ID NO: 2619 - RNA, 25 nt, Homo sapiens
  source 1..25: mol_type = unassigned RNA
cccctctcctgagcaagcacactgc

SEQ ID NO: 2620 - RNA, 25 nt, Homo sapiens
  source 1..25: mol_type = unassigned RNA
ccctctcctgagcaagcacactgct

SEQ ID NO: 2621 - RNA, 25 nt, Homo sapiens
  source 1..25: mol_type = unassigned RNA
cctctcctgagcaagcacactgctg

SEQ ID NO: 2622 - RNA, 25 nt, Homo sapiens
  source 1..25: mol_type = unassigned RNA
cactgctggggttttcttctctacc

SEQ ID NO: 2623 - RNA, 25 nt, Homo sapiens
  source 1..25: mol_type = unassigned RNA
tctctaccaggagttaatgattctt

SEQ ID NO: 2624 - RNA, 25 nt, Homo sapiens
  source 1..25: mol_type = unassigned RNA
tcaactacaaaacaaaaaacaaaaa

SEQ ID NO: 2625 - RNA, 25 nt, Homo sapiens
  source 1..25: mol_type = unassigned RNA
caactacaaaacaaaaaacaaaaac

SEQ ID NO: 2626 - RNA, 25 nt, Homo sapiens
  source 1..25: mol_type = unassigned RNA
aacagttttttctaatggctattca

SEQ ID NO: 2627 - RNA, 25 nt, Homo sapiens
  source 1..25: mol_type = unassigned RNA
tccctggtcgaacagttttttctaa

SEQ ID NO: 2628 - RNA, 25 nt, Homo sapiens
  source 1..25: mol_type = unassigned RNA
cttctctggggactctgaacttccc

SEQ ID NO: 2629 - RNA, 25 nt, Homo sapiens
  source 1..25: mol_type = unassigned RNA
tggagatgacaacttgacttctctg

SEQ ID NO: 2630 - RNA, 25 nt, Homo sapiens
  source 1..25: mol_type = unassigned RNA
ctggagatgacaacttgacttctct

SEQ ID NO: 2631 - RNA, 25 nt, Homo sapiens
  source 1..25: mol_type = unassigned RNA
tctggagatgacaacttgacttctc

SEQ ID NO: 2632 - RNA, 25 nt, Homo sapiens
  source 1..25: mol_type = unassigned RNA
aaaattggaataggtgccaaggatc

SEQ ID NO: 2633 - RNA, 25 nt, Homo sapiens
  source 1..25: mol_type = unassigned RNA
gttccgaaaattggaataggtgcca

SEQ ID NO: 2634 - RNA, 25 nt, Homo sapiens
  source 1..25: mol_type = unassigned RNA
tcccgttggttccgaaaattggaat

SEQ ID NO: 2635 - RNA, 25 nt, Homo sapiens
  source 1..25: mol_type = unassigned RNA
accaattcccgttggttccgaaaat

SEQ ID NO: 2636 - RNA, 25 nt, Homo sapiens
  source 1..25: mol_type = unassigned RNA
ttaatgtcattccaccaattcccgt

SEQ ID NO: 2637 - RNA, 25 nt, Homo sapiens
  source 1..25: mol_type = unassigned RNA
aatacagcatccctttctcaacagc

SEQ ID NO: 2638 - RNA, 25 nt, Homo sapiens
  source 1..25: mol_type = unassigned RNA
ctgttcatggtgtgagtacctctgg

SEQ ID NO: 2639 - RNA, 25 nt, Homo sapiens
  source 1..25: mol_type = unassigned RNA
tttctgttcatggtgtgagtacctc

SEQ ID NO: 2640 - RNA, 25 nt, Homo sapiens
  source 1..25: mol_type = unassigned RNA
ataaaatgtctgccatttctgttca

SEQ ID NO: 2641 - RNA, 25 nt, Homo sapiens
  source 1..25: mol_type = unassigned RNA
caagctttcctggagcaaatataat

SEQ ID NO: 2642 - RNA, 25 nt, Homo sapiens
  source 1..25: mol_type = unassigned RNA
cagtttactgtcaggcaagctttcc

SEQ ID NO: 2643 - RNA, 25 nt, Homo sapiens
  source 1..25: mol_type = unassigned RNA
gagaaactgggcacagtttactgtc

SEQ ID NO: 2644 - RNA, 25 nt, Homo sapiens
  source 1..25: mol_type = unassigned RNA
ctggggtaattaagcaagagaaact

SEQ ID NO: 2645 - RNA, 25 nt, Homo sapiens
  source 1..25: mol_type = unassigned RNA
cctggggtaattaagcaagagaaac

SEQ ID NO: 2646 - RNA, 25 nt, Homo sapiens
  source 1..25: mol_type = unassigned RNA
gatttcatcgaactctgcacccctg

SEQ ID NO: 2647 - RNA, 25 nt, Homo sapiens
  source 1..25: mol_type = unassigned RNA
agatttcatcgaactctgcacccct

SEQ ID NO: 2648 - RNA, 25 nt, Homo sapiens
  source 1..25: mol_type = unassigned RNA
aagatttcatcgaactctgcacccc

SEQ ID NO: 2649 - RNA, 25 nt, Homo sapiens
  source 1..25: mol_type = unassigned RNA
cccaaaattaaggataatggagatc

SEQ ID NO: 2650 - RNA, 25 nt, Homo sapiens
  source 1..25: mol_type = unassigned RNA
acactaaacccaaaattaaggataa

SEQ ID NO: 2651 - RNA, 25 nt, Homo sapiens
  source 1..25: mol_type = unassigned RNA
ttaccggacactaaacccaaaatta

SEQ ID NO: 2652 - RNA, 25 nt, Homo sapiens
  source 1..25: mol_type = unassigned RNA
gaggactgcaagcctctcattttac

SEQ ID NO: 2653 - RNA, 25 nt, Homo sapiens
  source 1..25: mol_type = unassigned RNA
ttccttttggaaggaaactcgaatg

SEQ ID NO: 2654 - RNA, 25 nt, Homo sapiens
  source 1..25: mol_type = unassigned RNA
gagaagacgattcattccttttgga

SEQ ID NO: 2655 - RNA, 25 nt, Homo sapiens
  source 1..25: mol_type = unassigned RNA
gcgggagaagacgattcattccttt

SEQ ID NO: 2656 - RNA, 25 nt, Homo sapiens
  source 1..25: mol_type = unassigned RNA
aaaactgtttgctttctcctctggc

SEQ ID NO: 2657 - RNA, 25 nt, Homo sapiens
  source 1..25: mol_type = unassigned RNA
gaaaactgtttgctttctcctctgg

SEQ ID NO: 2658 - RNA, 25 nt, Homo sapiens
  source 1..25: mol_type = unassigned RNA
gatgaaaactgtttgctttctcctc

SEQ ID NO: 2659 - RNA, 25 nt, Homo sapiens
  source 1..25: mol_type = unassigned RNA
aggtaaagagacgaatgagagtcct

SEQ ID NO: 2660 - RNA, 25 nt, Homo sapiens
  source 1..25: mol_type = unassigned RNA
atttggagttttcttctgggtcccc

SEQ ID NO: 2661 - RNA, 25 nt, Homo sapiens
  source 1..25: mol_type = unassigned RNA
tttgcaggatttggagttttcttct

SEQ ID NO: 2662 - RNA, 25 nt, Homo sapiens
  source 1..25: mol_type = unassigned RNA
ttttgcaggatttggagttttcttc

SEQ ID NO: 2663 - RNA, 25 nt, Homo sapiens
  source 1..25: mol_type = unassigned RNA
agcacctttgacattttgcaggatt

SEQ ID NO: 2664 - RNA, 25 nt, Homo sapiens
  source 1..25: mol_type = unassigned RNA
gaccaaagcacctttgacattttgc

SEQ ID NO: 2665 - RNA, 25 nt, Homo sapiens
  source 1..25: mol_type = unassigned RNA
tgaagggccagactggcaccaacgg

SEQ ID NO: 2666 - RNA, 25 nt, Homo sapiens
  source 1..25: mol_type = unassigned RNA
atttgaagggccagactggcaccaa

SEQ ID NO: 2667 - RNA, 25 nt, Homo sapiens
  source 1..25: mol_type = unassigned RNA
aacagcaacatttgaagggccagac

SEQ ID NO: 2668 - RNA, 25 nt, Homo sapiens
  source 1..25: mol_type = unassigned RNA
tatcttcagaacagcaacatttgaa

SEQ ID NO: 2669 - RNA, 25 nt, Homo sapiens
  source 1..25: mol_type = unassigned RNA
gtatcttcagaacagcaacatttga

SEQ ID NO: 2670 - RNA, 25 nt, Homo sapiens
  source 1..25: mol_type = unassigned RNA
gctgtgtctgctgcccccacagaga

SEQ ID NO: 2671 - RNA, 25 nt, Homo sapiens
  source 1..25: mol_type = unassigned RNA
ggaagaaagcattgcaaacctcaat

SEQ ID NO: 2672 - RNA, 25 nt, Homo sapiens
  source 1..25: mol_type = unassigned RNA
tcgggggaaacagacttaaagcttt

SEQ ID NO: 2673 - RNA, 25 nt, Homo sapiens
  source 1..25: mol_type = unassigned RNA
cagggccaaatcagcctttcctcgg

SEQ ID NO: 2674 - RNA, 25 nt, Homo sapiens
  source 1..25: mol_type = unassigned RNA
gcagggccaaatcagcctttcctcg

SEQ ID NO: 2675 - RNA, 25 nt, Homo sapiens
  source 1..25: mol_type = unassigned RNA
agcagggccaaatcagcctttcctc

SEQ ID NO: 2676 - RNA, 25 nt, Homo sapiens
  source 1..25: mol_type = unassigned RNA
cagcagggccaaatcagcctttcct

SEQ ID NO: 2677 - RNA, 25 nt, Homo sapiens
  source 1..25: mol_type = unassigned RNA
gaaatgacctgggattcccacagca

SEQ ID NO: 2678 - RNA, 25 nt, Homo sapiens
  source 1..25: mol_type = unassigned RNA
ggaaatgacctgggattcccacagc

SEQ ID NO: 2679 - RNA, 25 nt, Homo sapiens
  source 1..25: mol_type = unassigned RNA
aaacaaaagtgatgggaaatgacct

SEQ ID NO: 2680 - RNA, 25 nt, Homo sapiens
  source 1..25: mol_type = unassigned RNA
gaaacaaaagtgatgggaaatgacc

SEQ ID NO: 2681 - RNA, 25 nt, Homo sapiens
  source 1..25: mol_type = unassigned RNA
tgggagagacagaaacaaaagtgat

SEQ ID NO: 2682 - RNA, 25 nt, Homo sapiens
  source 1..25: mol_type = unassigned RNA
atgggagagacagaaacaaaagtga

SEQ ID NO: 2683 - RNA, 25 nt, Homo sapiens
  source 1..25: mol_type = unassigned RNA
tttcactctcaatgggactgtatat

SEQ ID NO: 2684 - RNA, 25 nt, Homo sapiens
  source 1..25: mol_type = unassigned RNA
gtttcactctcaatgggactgtata

SEQ ID NO: 2685 - RNA, 25 nt, Homo sapiens
  source 1..25: mol_type = unassigned RNA
tgtccaaagcagtttcactctcaat

SEQ ID NO: 2686 - RNA, 25 nt, Homo sapiens
  source 1..25: mol_type = unassigned RNA
ctgtccaaagcagtttcactctcaa

SEQ ID NO: 2687 - RNA, 25 nt, Homo sapiens
  source 1..25: mol_type = unassigned RNA
gaagacttttggttgattttccaaa

SEQ ID NO: 2688 - RNA, 25 nt, Homo sapiens
  source 1..25: mol_type = unassigned RNA
tcagactccaagcagcgaagacttt

SEQ ID NO: 2689 - RNA, 25 nt, Homo sapiens
  source 1..25: mol_type = unassigned RNA
aaggtttctgcgtcttcaccctcac

SEQ ID NO: 2690 - RNA, 25 nt, Homo sapiens
  source 1..25: mol_type = unassigned RNA
accctaagaggaggagctactgtga

SEQ ID NO: 2691 - RNA, 25 nt, Homo sapiens
  source 1..25: mol_type = unassigned RNA
tggacttctataaaaccctaagagg

SEQ ID NO: 2692 - RNA, 25 nt, Homo sapiens
  source 1..25: mol_type = unassigned RNA
tgatggacttctataaaaccctaag

SEQ ID NO: 2693 - RNA, 25 nt, Homo sapiens
  source 1..25: mol_type = unassigned RNA
cttgctcaggagaggggagatgtga

SEQ ID NO: 2694 - RNA, 25 nt, Homo sapiens
  source 1..25: mol_type = unassigned RNA
ccagcagtgtgcttgctcaggagag

SEQ ID NO: 2695 - RNA, 25 nt, Homo sapiens
  source 1..25: mol_type = unassigned RNA
cccagcagtgtgcttgctcaggaga

SEQ ID NO: 2696 - RNA, 25 nt, Homo sapiens
  source 1..25: mol_type = unassigned RNA
ccccagcagtgtgcttgctcaggag

SEQ ID NO: 2697 - RNA, 25 nt, Homo sapiens
  source 1..25: mol_type = unassigned RNA
gaaaaccccagcagtgtgcttgctc

SEQ ID NO: 2698 - RNA, 25 nt, Homo sapiens
  source 1..25: mol_type = unassigned RNA
tggactccaaagaatcattaactcc

SEQ ID NO: 2699 - RNA, 25 nt, Homo sapiens
  source 1..25: mol_type = unassigned RNA
ttgttttgtagttgatattcactga

SEQ ID NO: 2700 - RNA, 25 nt, Homo sapiens
  source 1..25: mol_type = unassigned RNA
cccctcccgcctcgcttcttacctc

SEQ ID NO: 2701 - RNA, 25 nt, Homo sapiens
  source 1..25: mol_type = unassigned RNA
ccgcctcgcttcttacctctggcag

SEQ ID NO: 2702 - RNA, 25 nt, Homo sapiens
  source 1..25: mol_type = unassigned RNA
aaacaacttagcttgtgaacgcaga

SEQ ID NO: 2703 - RNA, 25 nt, Homo sapiens
  source 1..25: mol_type = unassigned RNA
cttagcttgtgaacgcagaaggagc

SEQ ID NO: 2704 - RNA, 25 nt, Homo sapiens
  source 1..25: mol_type = unassigned RNA
agcttgtgaacgcagaaggagcagg

SEQ ID NO: 2705 - RNA, 25 nt, Homo sapiens
  source 1..25: mol_type = unassigned RNA
gcttgtgaacgcagaaggagcagga

SEQ ID NO: 2706 - RNA, 25 nt, Homo sapiens
  source 1..25: mol_type = unassigned RNA
aaatatattttttttttctaaaaaa

SEQ ID NO: 2707 - RNA, 25 nt, Homo sapiens
  source 1..25: mol_type = unassigned RNA
aagtaaacagccgcccctttctcca

SEQ ID NO: 2708 - RNA, 25 nt, Homo sapiens
  source 1..25: mol_type = unassigned RNA
agtaaacagccgcccctttctccat

SEQ ID NO: 2709 - RNA, 25 nt, Homo sapiens
  source 1..25: mol_type = unassigned RNA
aaacagccgcccctttctccatggg

SEQ ID NO: 2710 - RNA, 25 nt, Homo sapiens
  source 1..25: mol_type = unassigned RNA
aacagccgcccctttctccatgggt

SEQ ID NO: 2711 - RNA, 25 nt, Homo sapiens
  source 1..25: mol_type = unassigned RNA
acagccgcccctttctccatgggtg

SEQ ID NO: 2712 - RNA, 25 nt, Homo sapiens
  source 1..25: mol_type = unassigned RNA
cagccgcccctttctccatgggtgg

SEQ ID NO: 2713 - RNA, 25 nt, Homo sapiens
  source 1..25: mol_type = unassigned RNA
agccgcccctttctccatgggtggg

SEQ ID NO: 2714 - RNA, 25 nt, Homo sapiens
  source 1..25: mol_type = unassigned RNA
gacaagccagccctccgccccgcgc

SEQ ID NO: 2715 - RNA, 25 nt, Homo sapiens
  source 1..25: mol_type = unassigned RNA
acaagccagccctccgccccgcgcc

SEQ ID NO: 2716 - RNA, 25 nt, Homo sapiens
  source 1..25: mol_type = unassigned RNA
gccctccgccccgcgccgggctccg

SEQ ID NO: 2717 - RNA, 25 nt, Homo sapiens
  source 1..25: mol_type = unassigned RNA
ccctccgccccgcgccgggctccgc

SEQ ID NO: 2718 - RNA, 25 nt, Homo sapiens
  source 1..25: mol_type = unassigned RNA
gccccgcgccgggctccgcgggtcg

SEQ ID NO: 2719 - RNA, 25 nt, Homo sapiens
  source 1..25: mol_type = unassigned RNA
cgccgggctccgcgggtcgaggttc

SEQ ID NO: 2720 - RNA, 25 nt, Homo sapiens
  source 1..25: mol_type = unassigned RNA
gccgggctccgcgggtcgaggttcc

SEQ ID NO: 2721 - RNA, 25 nt, Homo sapiens
  source 1..25: mol_type = unassigned RNA
ggttccgggcgcgcgtgccccgtcc

SEQ ID NO: 2722 - RNA, 25 nt, Homo sapiens
  source 1..25: mol_type = unassigned RNA
tgccccgtcccggtcccagctgctt

SEQ ID NO: 2723 - RNA, 25 nt, Homo sapiens
  source 1..25: mol_type = unassigned RNA
ccggtcccagctgcttcggccgctc

SEQ ID NO: 2724 - RNA, 25 nt, Homo sapiens
  source 1..25: mol_type = unassigned RNA
ccagctgcttcggccgctccggctg

SEQ ID NO: 2725 - RNA, 25 nt, Homo sapiens
  source 1..25: mol_type = unassigned RNA
ttccacccacagaatccgtccccga

SEQ ID NO: 2726 - RNA, 25 nt, Homo sapiens
  source 1..25: mol_type = unassigned RNA
tccacccacagaatccgtccccgac

SEQ ID NO: 2727 - RNA, 25 nt, Homo sapiens
  source 1..25: mol_type = unassigned RNA
cccacagaatccgtccccgacgggc

SEQ ID NO: 2728 - RNA, 25 nt, Homo sapiens
  source 1..25: mol_type = unassigned RNA
acagaatccgtccccgacgggcagg

SEQ ID NO: 2729 - RNA, 25 nt, Homo sapiens
  source 1..25: mol_type = unassigned RNA
cgtccccgacgggcaggcggtgact

SEQ ID NO: 2730 - RNA, 25 nt, Homo sapiens
  source 1..25: mol_type = unassigned RNA
gtccccgacgggcaggcggtgactc

SEQ ID NO: 2731 - RNA, 25 nt, Homo sapiens
  source 1..25: mol_type = unassigned RNA
ccgtcacagacacgagctcgcaaaa

SEQ ID NO: 2732 - RNA, 25 nt, Homo sapiens
  source 1..25: mol_type = unassigned RNA
tcacagacacgagctcgcaaaatgg

SEQ ID NO: 2733 - RNA, 25 nt, Homo sapiens
  source 1..25: mol_type = unassigned RNA
cagacacgagctcgcaaaatggagg

SEQ ID NO: 2734 - RNA, 25 nt, Homo sapiens
  source 1..25: mol_type = unassigned RNA
acacgagctcgcaaaatggaggagg

SEQ ID NO: 2735 - RNA, 25 nt, Homo sapiens
  source 1..25: mol_type = unassigned RNA
cgagctcgcaaaatggaggaggcgg

SEQ ID NO: 2736 - RNA, 25 nt, Homo sapiens
  source 1..25: mol_type = unassigned RNA
gctcgcaaaatggaggaggcggcgg

SEQ ID NO: 2737 - RNA, 25 nt, Homo sapiens
  source 1..25: mol_type = unassigned RNA
cgcaaaatggaggaggcggcggcgg

SEQ ID NO: 2738 - RNA, 25 nt, Homo sapiens
  source 1..25: mol_type = unassigned RNA
gcaaaatggaggaggcggcggcgga

SEQ ID NO: 2739 - RNA, 25 nt, Homo sapiens
  source 1..25: mol_type = unassigned RNA
aggcggcggcggagggaagagagcg

SEQ ID NO: 2740 - RNA, 25 nt, Homo sapiens
  source 1..25: mol_type = unassigned RNA
agggaagagagcgcggacacgcgaa

SEQ ID NO: 2741 - RNA, 25 nt, Homo sapiens
  source 1..25: mol_type = unassigned RNA
gggaagagagcgcggacacgcgaaa

SEQ ID NO: 2742 - RNA, 25 nt, Homo sapiens
  source 1..25: mol_type = unassigned RNA
agcgcggacacgcgaaagggcagcc

SEQ ID NO: 2743 - RNA, 25 nt, Homo sapiens
  source 1..25: mol_type = unassigned RNA
ggacacgcgaaagggcagcccggcc

SEQ ID NO: 2744 - RNA, 25 nt, Homo sapiens
  source 1..25: mol_type = unassigned RNA
gacacgcgaaagggcagcccggcct

SEQ ID NO: 2745 - RNA, 25 nt, Homo sapiens
  source 1..25: mol_type = unassigned RNA
gggcagcccggcctgggcgagcgag

SEQ ID NO: 2746 - RNA, 25 nt, Homo sapiens
  source 1..25: mol_type = unassigned RNA
ggcagcccggcctgggcgagcgagc

SEQ ID NO: 2747 - RNA, 25 nt, Homo sapiens
  source 1..25: mol_type = unassigned RNA
gcctgggcgagcgagcgggaccgag

SEQ ID NO: 2748 - RNA, 25 nt, Homo sapiens
  source 1..25: mol_type = unassigned RNA
cctgggcgagcgagcgggaccgagc

SEQ ID NO: 2749 - RNA, 25 nt, Homo sapiens
  source 1..25: mol_type = unassigned RNA
ctgggcgagcgagcgggaccgagcg

SEQ ID NO: 2750 - RNA, 25 nt, Homo sapiens
  source 1..25: mol_type = unassigned RNA
cgagcgagcgggaccgagcggggag

SEQ ID NO: 2751 - RNA, 25 nt, Homo sapiens
  source 1..25: mol_type = unassigned RNA
gagcgagcgggaccgagcggggagc

SEQ ID NO: 2752 - RNA, 25 nt, Homo sapiens
  source 1..25: mol_type = unassigned RNA
cgagcgggaccgagcggggagcggg

SEQ ID NO: 2753 - RNA, 25 nt, Homo sapiens
  source 1..25: mol_type = unassigned RNA
gcgggaccgagcggggagcgggtgg

SEQ ID NO: 2754 - RNA, 25 nt, Homo sapiens
  source 1..25: mol_type = unassigned RNA
ggaccgagcggggagcgggtggagg

SEQ ID NO: 2755 - RNA, 25 nt, Homo sapiens
  source 1..25: mol_type = unassigned RNA
cggggagcgggtggaggcggcgcca

SEQ ID NO: 2756 - RNA, 25 nt, Homo sapiens
  source 1..25: mol_type = unassigned RNA
cagaggtaagaagcgaggcgggagg

SEQ ID NO: 2757 - RNA, 25 nt, Homo sapiens
  source 1..25: mol_type = unassigned RNA
ccagaggtaagaagcgaggcgggag

SEQ ID NO: 2758 - RNA, 25 nt, Homo sapiens
  source 1..25: mol_type = unassigned RNA
gccagaggtaagaagcgaggcggga

SEQ ID NO: 2759 - RNA, 25 nt, Homo sapiens
  source 1..25: mol_type = unassigned RNA
tgccagaggtaagaagcgaggcggg

SEQ ID NO: 2760 - RNA, 25 nt, Homo sapiens
  source 1..25: mol_type = unassigned RNA
ctctgccagaggtaagaagcgaggc

SEQ ID NO: 2761 - RNA, 25 nt, Homo sapiens
  source 1..25: mol_type = unassigned RNA
cctctgccagaggtaagaagcgagg

SEQ ID NO: 2762 - RNA, 25 nt, Homo sapiens
  source 1..25: mol_type = unassigned RNA
gctcctctgccagaggtaagaagcg

SEQ ID NO: 2763 - RNA, 25 nt, Homo sapiens
  source 1..25: mol_type = unassigned RNA
ggcgggcgagcggctcctctgccag

SEQ ID NO: 2764 - RNA, 25 nt, Homo sapiens
  source 1..25: mol_type = unassigned RNA
ggaactgcggacggtggcgggcgag

SEQ ID NO: 2765 - RNA, 25 nt, Homo sapiens
  source 1..25: mol_type = unassigned RNA
tgcggcgggaactgcggacggtggc

SEQ ID NO: 2766 - RNA, 25 nt, Homo sapiens
  source 1..25: mol_type = unassigned RNA
ctgcggcgggaactgcggacggtgg

SEQ ID NO: 2767 - RNA, 25 nt, Homo sapiens
  source 1..25: mol_type = unassigned RNA
cggctgcggcgggaactgcggacgg

SEQ ID NO: 2768 - RNA, 25 nt, Homo sapiens
  source 1..25: mol_type = unassigned RNA
tctcggctgcggcgggaactgcgga

SEQ ID NO: 2769 - RNA, 25 nt, Homo sapiens
  source 1..25: mol_type = unassigned RNA
tttatctcggctgcggcgggaactg

SEQ ID NO: 2770 - RNA, 25 nt, Homo sapiens
  source 1..25: mol_type = unassigned RNA
ctaagttgtttatctcggctgcggc

SEQ ID NO: 2771 - RNA, 25 nt, Homo sapiens
  source 1..25: mol_type = unassigned RNA
gctaagttgtttatctcggctgcgg

SEQ ID NO: 2772 - RNA, 25 nt, Homo sapiens
  source 1..25: mol_type = unassigned RNA
caagctaagttgtttatctcggctg

SEQ ID NO: 2773 - RNA, 25 nt, Homo sapiens
  source 1..25: mol_type = unassigned RNA
cgttcacaagctaagttgtttatct

SEQ ID NO: 2774 - RNA, 25 nt, Homo sapiens
  source 1..25: mol_type = unassigned RNA
ctccccccacccatggagaaagggg

SEQ ID NO: 2775 - RNA, 25 nt, Homo sapiens
  source 1..25: mol_type = unassigned RNA
gctctccccccacccatggagaaag

SEQ ID NO: 2776 - RNA, 25 nt, Homo sapiens
  source 1..25: mol_type = unassigned RNA
ggctctccccccacccatggagaaa

SEQ ID NO: 2777 - RNA, 25 nt, Homo sapiens
  source 1..25: mol_type = unassigned RNA
gggctctccccccacccatggagaa

SEQ ID NO: 2778 - RNA, 25 nt, Homo sapiens
  source 1..25: mol_type = unassigned RNA
taaataggggctctccccccaccca

SEQ ID NO: 2779 - RNA, 25 nt, Homo sapiens
  source 1..25: mol_type = unassigned RNA
ggcaatgggagactttcttaaatag

SEQ ID NO: 2780 - RNA, 25 nt, Homo sapiens
  source 1..25: mol_type = unassigned RNA
gggcaatgggagactttcttaaata

SEQ ID NO: 2781 - RNA, 25 nt, Homo sapiens
  source 1..25: mol_type = unassigned RNA
tgggcaatgggagactttcttaaat

SEQ ID NO: 2782 - RNA, 25 nt, Homo sapiens
  source 1..25: mol_type = unassigned RNA
agggctggcttgtcagctgggcaat

SEQ ID NO: 2783 - RNA, 25 nt, Homo sapiens
  source 1..25: mol_type = unassigned RNA
gagggctggcttgtcagctgggcaa

SEQ ID NO: 2784 - RNA, 25 nt, Homo sapiens
  source 1..25: mol_type = unassigned RNA
ggggcggagggctggcttgtcagct

SEQ ID NO: 2785 - RNA, 25 nt, Homo sapiens
  source 1..25: mol_type = unassigned RNA
cggggcggagggctggcttgtcagc

SEQ ID NO: 2786 - RNA, 25 nt, Homo sapiens
  source 1..25: mol_type = unassigned RNA
cggagcccggcgcggggcggagggc

SEQ ID NO: 2787 - RNA, 25 nt, Homo sapiens
  source 1..25: mol_type = unassigned RNA
cccgcggagcccggcgcggggcgga

SEQ ID NO: 2788 - RNA, 25 nt, Homo sapiens
  source 1..25: mol_type = unassigned RNA
acccgcggagcccggcgcggggcgg

SEQ ID NO: 2789 - RNA, 25 nt, Homo sapiens
  source 1..25: mol_type = unassigned RNA
tcgacccgcggagcccggcgcgggg

SEQ ID NO: 2790 - RNA, 25 nt, Homo sapiens
  source 1..25: mol_type = unassigned RNA
acctcgacccgcggagcccggcgcg

SEQ ID NO: 2791 - RNA, 25 nt, Homo sapiens
  source 1..25: mol_type = unassigned RNA
aacctcgacccgcggagcccggcgc

SEQ ID NO: 2792 - RNA, 25 nt, Homo sapiens
  source 1..25: mol_type = unassigned RNA
gaacctcgacccgcggagcccggcg

SEQ ID NO: 2793 - RNA, 25 nt, Homo sapiens
  source 1..25: mol_type = unassigned RNA
gcccggaacctcgacccgcggagcc

SEQ ID NO: 2794 - RNA, 25 nt, Homo sapiens
  source 1..25: mol_type = unassigned RNA
cacgcgcgcccggaacctcgacccg

SEQ ID NO: 2795 - RNA, 25 nt, Homo sapiens
  source 1..25: mol_type = unassigned RNA
gggaccgggacggggcacgcgcgcc

SEQ ID NO: 2796 - RNA, 25 nt, Homo sapiens
  source 1..25: mol_type = unassigned RNA
ggccgaagcagctgggaccgggacg

SEQ ID NO: 2797 - RNA, 25 nt, Homo sapiens
  source 1..25: mol_type = unassigned RNA
cggccgaagcagctgggaccgggac

SEQ ID NO: 2798 - RNA, 25 nt, Homo sapiens
  source 1..25: mol_type = unassigned RNA
gcggccgaagcagctgggaccggga

SEQ ID NO: 2799 - RNA, 25 nt, Homo sapiens
  source 1..25: mol_type = unassigned RNA
cggagcggccgaagcagctgggacc

SEQ ID NO: 2800 - RNA, 25 nt, Homo sapiens
  source 1..25: mol_type = unassigned RNA
ccggagcggccgaagcagctgggac

SEQ ID NO: 2801 - RNA, 25 nt, Homo sapiens
  source 1..25: mol_type = unassigned RNA
cgcagccggagcggccgaagcagct

SEQ ID NO: 2802 - RNA, 25 nt, Homo sapiens
  source 1..25: mol_type = unassigned RNA
ccgcagccggagcggccgaagcagc

SEQ ID NO: 2803 - RNA, 25 nt, Homo sapiens
  source 1..25: mol_type = unassigned RNA
gtggaaggagacgccgcagccggag

SEQ ID NO: 2804 - RNA, 25 nt, Homo sapiens
  source 1..25: mol_type = unassigned RNA
tgtgggtggaaggagacgccgcagc

SEQ ID NO: 2805 - RNA, 25 nt, Homo sapiens
  source 1..25: mol_type = unassigned RNA
gtcggggacggattctgtgggtgga

SEQ ID NO: 2806 - RNA, 25 nt, Homo sapiens
  source 1..25: mol_type = unassigned RNA
gcccgtcggggacggattctgtggg

SEQ ID NO: 2807 - RNA, 25 nt, Homo sapiens
  source 1..25: mol_type = unassigned RNA
cctgcccgtcggggacggattctgt

SEQ ID NO: 2808 - RNA, 25 nt, Homo sapiens
  source 1..25: mol_type = unassigned RNA
gcctgcccgtcggggacggattctg

SEQ ID NO: 2809 - RNA, 25 nt, Homo sapiens
  source 1..25: mol_type = unassigned RNA
cgagtcaccgcctgcccgtcgggga

SEQ ID NO: 2810 - RNA, 25 nt, Homo sapiens
  source 1..25: mol_type = unassigned RNA
agcccgagtcaccgcctgcccgtcg

SEQ ID NO: 2811 - RNA, 25 nt, Homo sapiens
  source 1..25: mol_type = unassigned RNA
gagcccgagtcaccgcctgcccgtc

SEQ ID NO: 2812 - RNA, 25 nt, Homo sapiens
  source 1..25: mol_type = unassigned RNA
ggagcccgagtcaccgcctgcccgt

SEQ ID NO: 2813 - RNA, 25 nt, Homo sapiens
  source 1..25: mol_type = unassigned RNA
cattttgcgagctcgtgtctgtgac

SEQ ID NO: 2814 - RNA, 25 nt, Homo sapiens
  source 1..25: mol_type = unassigned RNA
ccattttgcgagctcgtgtctgtga

SEQ ID NO: 2815 - RNA, 25 nt, Homo sapiens
  source 1..25: mol_type = unassigned RNA
tcggtcccgctcgctcgcccaggcc

SEQ ID NO: 2816 - RNA, 25 nt, Homo sapiens
  source 1..25: mol_type = unassigned RNA
ctcggtcccgctcgctcgcccaggc

SEQ ID NO: 2817 - RNA, 25 nt, Homo sapiens
  source 1..25: mol_type = unassigned RNA
cccgctcggtcccgctcgctcgccc

SEQ ID NO: 2818 - RNA, 25 nt, Homo sapiens
  source 1..25: mol_type = unassigned RNA
gcgccgcctccacccgctccccgct

SEQ ID NO: 2819 - RNA, 25 nt, Homo sapiens
  source 1..25: mol_type = unassigned RNA
agcgggggtcggcgcatacgtactt

SEQ ID NO: 2820 - RNA, 25 nt, Homo sapiens
  source 1..25: mol_type = unassigned RNA
gcgggggtcggcgcatacgtacttt

SEQ ID NO: 2821 - RNA, 25 nt, Homo sapiens
  source 1..25: mol_type = unassigned RNA
ggtcggcgcatacgtactttgggcc

SEQ ID NO: 2822 - RNA, 25 nt, Homo sapiens
  source 1..25: mol_type = unassigned RNA
gtcggcgcatacgtactttgggccc

SEQ ID NO: 2823 - RNA, 25 nt, Homo sapiens
  source 1..25: mol_type = unassigned RNA
tcggcgcatacgtactttgggcccg

SEQ ID NO: 2824 - RNA, 25 nt, Homo sapiens
  source 1..25: mol_type = unassigned RNA
cggcgcatacgtactttgggcccgg

SEQ ID NO: 2825 - RNA, 25 nt, Homo sapiens
  source 1..25: mol_type = unassigned RNA
ggcgcatacgtactttgggcccggg

SEQ ID NO: 2826 - RNA, 25 nt, Homo sapiens
  source 1..25: mol_type = unassigned RNA
tttgggcccggggggagtcgcgtgc

SEQ ID NO: 2827 - RNA, 25 nt, Homo sapiens
  source 1..25: mol_type = unassigned RNA
ggcccggggggagtcgcgtgccggc

SEQ ID NO: 2828 - RNA, 25 nt, Homo sapiens
  source 1..25: mol_type = unassigned RNA
gcaggtcccccaccaccgcatcatc

SEQ ID NO: 2829 - RNA, 25 nt, Homo sapiens
  source 1..25: mol_type = unassigned RNA
caggtcccccaccaccgcatcatct

SEQ ID NO: 2830 - RNA, 25 nt, Homo sapiens
  source 1..25: mol_type = unassigned RNA
gtcccccaccaccgcatcatctggg

SEQ ID NO: 2831 - RNA, 25 nt, Homo sapiens
  source 1..25: mol_type = unassigned RNA
cccaccaccgcatcatctgggcggc

SEQ ID NO: 2832 - RNA, 25 nt, Homo sapiens
  source 1..25: mol_type = unassigned RNA
ccaccaccgcatcatctgggcggcc

SEQ ID NO: 2833 - RNA, 25 nt, Homo sapiens
  source 1..25: mol_type = unassigned RNA
agctgccgccgccgcgctctcgcac

SEQ ID NO: 2834 - RNA, 25 nt, Homo sapiens
  source 1..25: mol_type = unassigned RNA
gctgccgccgccgcgctctcgcact

SEQ ID NO: 2835 - RNA, 25 nt, Homo sapiens
  source 1..25: mol_type = unassigned RNA
gacctgccggcacgcgactcccccc

SEQ ID NO: 2836 - RNA, 25 nt, Homo sapiens
  source 1..25: mol_type = unassigned RNA
ggacctgccggcacgcgactccccc

SEQ ID NO: 2837 - RNA, 25 nt, Homo sapiens
  source 1..25: mol_type = unassigned RNA
gatgatgcggtggtgggggacctgc

SEQ ID NO: 2838 - RNA, 25 nt, Homo sapiens
  source 1..25: mol_type = unassigned RNA
ggccgcccagatgatgcggtggtgg

SEQ ID NO: 2839 - RNA, 25 nt, Homo sapiens
  source 1..25: mol_type = unassigned RNA
cggccgcccagatgatgcggtggtg

SEQ ID NO: 2840 - RNA, 25 nt, Homo sapiens
  source 1..25: mol_type = unassigned RNA
ccggccgcccagatgatgcggtggt

SEQ ID NO: 2841 - RNA, 25 nt, Homo sapiens
  source 1..25: mol_type = unassigned RNA
cccggccgcccagatgatgcggtgg

SEQ ID NO: 2842 - RNA, 25 nt, Homo sapiens
  source 1..25: mol_type = unassigned RNA
agacccggccgcccagatgatgcgg

SEQ ID NO: 2843 - RNA, 25 nt, Homo sapiens
  source 1..25: mol_type = unassigned RNA
tgaagacccggccgcccagatgatg

SEQ ID NO: 2844 - RNA, 25 nt, Homo sapiens
  source 1..25: mol_type = unassigned RNA
agcgcggcggcggcagctgaagacc

SEQ ID NO: 2845 - RNA, 25 nt, Homo sapiens
  source 1..25: mol_type = unassigned RNA
ctctcccagtgcgagagcgcggcgg

SEQ ID NO: 2846 - RNA, 25 nt, Homo sapiens
  source 1..25: mol_type = unassigned RNA
cttctctcccagtgcgagagcgcgg

SEQ ID NO: 2847 - RNA, 25 nt, Homo sapiens
  source 1..25: mol_type = unassigned RNA
caacttctctcccagtgcgagagcg

SEQ ID NO: 2848 - RNA, 25 nt, Homo sapiens
  source 1..25: mol_type = unassigned RNA
gaagcaaagtcttctttgttctttg

SEQ ID NO: 2849 - RNA, 25 nt, Homo sapiens
  source 1..25: mol_type = unassigned RNA
aaagtcttctttgttctttgaggaa

SEQ ID NO: 2850 - RNA, 25 nt, Homo sapiens
  source 1..25: mol_type = unassigned RNA
tctttgttctttgaggaaaggagcc

SEQ ID NO: 2851 - RNA, 25 nt, Homo sapiens
  source 1..25: mol_type = unassigned RNA
aggcagatgaaaattcctgttatta

SEQ ID NO: 2852 - RNA, 25 nt, Homo sapiens
  source 1..25: mol_type = unassigned RNA
gttattaaggtacaactaaagcccg

SEQ ID NO: 2853 - RNA, 25 nt, Homo sapiens
  source 1..25: mol_type = unassigned RNA
attaaggtacaactaaagcccgagg

SEQ ID NO: 2854 - RNA, 25 nt, Homo sapiens
  source 1..25: mol_type = unassigned RNA
ttaaggtacaactaaagcccgagga

SEQ ID NO: 2855 - RNA, 25 nt, Homo sapiens
  source 1..25: mol_type = unassigned RNA
ggtacaactaaagcccgaggagggt

SEQ ID NO: 2856 - RNA, 25 nt, Homo sapiens
  source 1..25: mol_type = unassigned RNA
gttcctccccattctcgcacagaga

SEQ ID NO: 2857 - RNA, 25 nt, Homo sapiens
  source 1..25: mol_type = unassigned RNA
aagtgcttatcaaagttaatatctg

SEQ ID NO: 2858 - RNA, 25 nt, Homo sapiens
  source 1..25: mol_type = unassigned RNA
cctctgcagcagtcgtcacagaagc

SEQ ID NO: 2859 - RNA, 25 nt, Homo sapiens
  source 1..25: mol_type = unassigned RNA
tcgtcacagaagctggcccctttcc

SEQ ID NO: 2860 - RNA, 25 nt, Homo sapiens
  source 1..25: mol_type = unassigned RNA
cgtcacagaagctggcccctttcct

SEQ ID NO: 2861 - RNA, 25 nt, Homo sapiens
  source 1..25: mol_type = unassigned RNA
tttcagatcagaagatcctgtctct

SEQ ID NO: 2862 - RNA, 25 nt, Homo sapiens
  source 1..25: mol_type = unassigned RNA
ttcagatcagaagatcctgtctctc

SEQ ID NO: 2863 - RNA, 25 nt, Homo sapiens
  source 1..25: mol_type = unassigned RNA
ctctcgggtataacttttttttttt

SEQ ID NO: 2864 - RNA, 25 nt, Homo sapiens
  source 1..25: mol_type = unassigned RNA
agaaatacagtgactctcctaatta

SEQ ID NO: 2865 - RNA, 25 nt, Homo sapiens
  source 1..25: mol_type = unassigned RNA
ccactgattcagcagatattccccc

SEQ ID NO: 2866 - RNA, 25 nt, Homo sapiens
  source 1..25: mol_type = unassigned RNA
agatattcccccaggcagatcctaa

SEQ ID NO: 2867 - RNA, 25 nt, Homo sapiens
  source 1..25: mol_type = unassigned RNA
agatcctaatggaaaccaacatgtg

SEQ ID NO: 2868 - RNA, 25 nt, Homo sapiens
  source 1..25: mol_type = unassigned RNA
gaaaccaacatgtgaggtctgatgc

SEQ ID NO: 2869 - RNA, 25 nt, Homo sapiens
  source 1..25: mol_type = unassigned RNA
aaaccaacatgtgaggtctgatgct

SEQ ID NO: 2870 - RNA, 25 nt, Homo sapiens
  source 1..25: mol_type = unassigned RNA
gctgggaattttatcatgctcaaca

SEQ ID NO: 2871 - RNA, 25 nt, Homo sapiens
  source 1..25: mol_type = unassigned RNA
cccactcatgccccagtgcttccgt

SEQ ID NO: 2872 - RNA, 25 nt, Homo sapiens
  source 1..25: mol_type = unassigned RNA
ttccgttggacacatgcgcatttta

SEQ ID NO: 2873 - RNA, 25 nt, Homo sapiens
  source 1..25: mol_type = unassigned RNA
acacatgcgcattttacggtcctgc

SEQ ID NO: 2874 - RNA, 25 nt, Homo sapiens
  source 1..25: mol_type = unassigned RNA
cacatgcgcattttacggtcctgca

SEQ ID NO: 2875 - RNA, 25 nt, Homo sapiens
  source 1..25: mol_type = unassigned RNA
ggcttgaaagatttctgaccttcta

SEQ ID NO: 2876 - RNA, 25 nt, Homo sapiens
  source 1..25: mol_type = unassigned RNA
tctgaccttctaaggtccagtgatt

SEQ ID NO: 2877 - RNA, 25 nt, Homo sapiens
  source 1..25: mol_type = unassigned RNA
agaagaggaagaggtaccttttgaa

SEQ ID NO: 2878 - RNA, 25 nt, Homo sapiens
  source 1..25: mol_type = unassigned RNA
gaagaggaagaggtaccttttgaat

SEQ ID NO: 2879 - RNA, 25 nt, Homo sapiens
  source 1..25: mol_type = unassigned RNA
aagaggaagaggtaccttttgaatg

SEQ ID NO: 2880 - RNA, 25 nt, Homo sapiens
  source 1..25: mol_type = unassigned RNA
cccttacataacctgaccacacaat

SEQ ID NO: 2881 - RNA, 25 nt, Homo sapiens
  source 1..25: mol_type = unassigned RNA
ttacataacctgaccacacaatagg

SEQ ID NO: 2882 - RNA, 25 nt, Homo sapiens
  source 1..25: mol_type = unassigned RNA
ctttgcttcattaaagtgtctgaga

SEQ ID NO: 2883 - RNA, 25 nt, Homo sapiens
  source 1..25: mol_type = unassigned RNA
ttaataacaggaattttcatctgcc

SEQ ID NO: 2884 - RNA, 25 nt, Homo sapiens
  source 1..25: mol_type = unassigned RNA
cgggctttagttgtaccttaataac

SEQ ID NO: 2885 - RNA, 25 nt, Homo sapiens
  source 1..25: mol_type = unassigned RNA
acaaaatgcagctcctaccctcctc

SEQ ID NO: 2886 - RNA, 25 nt, Homo sapiens
  source 1..25: mol_type = unassigned RNA
aacaaaatgcagctcctaccctcct

SEQ ID NO: 2887 - RNA, 25 nt, Homo sapiens
  source 1..25: mol_type = unassigned RNA
gtgccttctctgtgcgagaatgggg

SEQ ID NO: 2888 - RNA, 25 nt, Homo sapiens
  source 1..25: mol_type = unassigned RNA
tgagtgccttctctgtgcgagaatg

SEQ ID NO: 2889 - RNA, 25 nt, Homo sapiens
  source 1..25: mol_type = unassigned RNA
atgagtgccttctctgtgcgagaat

SEQ ID NO: 2890 - RNA, 25 nt, Homo sapiens
  source 1..25: mol_type = unassigned RNA
aatgagtgccttctctgtgcgagaa

SEQ ID NO: 2891 - RNA, 25 nt, Homo sapiens
  source 1..25: mol_type = unassigned RNA
cttctgtgacgactgctgcagaggc

SEQ ID NO: 2892 - RNA, 25 nt, Homo sapiens
  source 1..25: mol_type = unassigned RNA
ccagcttctgtgacgactgctgcag

SEQ ID NO: 2893 - RNA, 25 nt, Homo sapiens
  source 1..25: mol_type = unassigned RNA
tctcagagcagttagcccaggaaag

SEQ ID NO: 2894 - RNA, 25 nt, Homo sapiens
  source 1..25: mol_type = unassigned RNA
ctctcagagcagttagcccaggaaa

SEQ ID NO: 2895 - RNA, 25 nt, Homo sapiens
  source 1..25: mol_type = unassigned RNA
gctctcagagcagttagcccaggaa

SEQ ID NO: 2896 - RNA, 25 nt, Homo sapiens
  source 1..25: mol_type = unassigned RNA
ctggtgctctcagagcagttagccc

SEQ ID NO: 2897 - RNA, 25 nt, Homo sapiens
  source 1..25: mol_type = unassigned RNA
gtcatatctaagtcagatttcattc

SEQ ID NO: 2898 - RNA, 25 nt, Homo sapiens
  source 1..25: mol_type = unassigned RNA
tgtgtagctggcttcttctgaaaaa

SEQ ID NO: 2899 - RNA, 25 nt, Homo sapiens
  source 1..25: mol_type = unassigned RNA
atttgttcatcaagagttgtgtagc

SEQ ID NO: 2900 - RNA, 25 nt, Homo sapiens
  source 1..25: mol_type = unassigned RNA
aaattctctggtttgtgctcatcgt

SEQ ID NO: 2901 - RNA, 25 nt, Homo sapiens
  source 1..25: mol_type = unassigned RNA
aattttcttcacttctgaaattctc

SEQ ID NO: 2902 - RNA, 25 nt, Homo sapiens
  source 1..25: mol_type = unassigned RNA
aaaaaaaaagttatacccgagagac

SEQ ID NO: 2903 - RNA, 25 nt, Homo sapiens
  source 1..25: mol_type = unassigned RNA
ctgaactaggaaattcaccataatt

SEQ ID NO: 2904 - RNA, 25 nt, Homo sapiens
  source 1..25: mol_type = unassigned RNA
tgaatcagtggctctgagctgaact

SEQ ID NO: 2905 - RNA, 25 nt, Homo sapiens
  source 1..25: mol_type = unassigned RNA
cctgggggaatatctgctgaatcag

SEQ ID NO: 2906 - RNA, 25 nt, Homo sapiens
  source 1..25: mol_type = unassigned RNA
ttggtttccattaggatctgcctgg

SEQ ID NO: 2907 - RNA, 25 nt, Homo sapiens
  source 1..25: mol_type = unassigned RNA
gttggtttccattaggatctgcctg

SEQ ID NO: 2908 - RNA, 25 nt, Homo sapiens
  source 1..25: mol_type = unassigned RNA
tgttggtttccattaggatctgcct

SEQ ID NO: 2909 - RNA, 25 nt, Homo sapiens
  source 1..25: mol_type = unassigned RNA
atgttggtttccattaggatctgcc

SEQ ID NO: 2910 - RNA, 25 nt, Homo sapiens
  source 1..25: mol_type = unassigned RNA
cagacctcacatgttggtttccatt

SEQ ID NO: 2911 - RNA, 25 nt, Homo sapiens
  source 1..25: mol_type = unassigned RNA
attcccagcatcagacctcacatgt

SEQ ID NO: 2912 - RNA, 25 nt, Homo sapiens
  source 1..25: mol_type = unassigned RNA
aaaagggaaagtggtgaaggcaggg

SEQ ID NO: 2913 - RNA, 25 nt, Homo sapiens
  source 1..25: mol_type = unassigned RNA
gaaaaaagggaaagtggtgaaggca

SEQ ID NO: 2914 - RNA, 25 nt, Homo sapiens
  source 1..25: mol_type = unassigned RNA
agaaaaaagggaaagtggtgaaggc

SEQ ID NO: 2915 - RNA, 25 nt, Homo sapiens
  source 1..25: mol_type = unassigned RNA
gagaagaaaaaagggaaagtggtga

SEQ ID NO: 2916 - RNA, 25 nt, Homo sapiens
  source 1..25: mol_type = unassigned RNA
gggtaagagaagaaaaaagggaaag

SEQ ID NO: 2917 - RNA, 25 nt, Homo sapiens
  source 1..25: mol_type = unassigned RNA
agaaagagggtaagagaagaaaaaa

SEQ ID NO: 2918 - RNA, 25 nt, Homo sapiens
  source 1..25: mol_type = unassigned RNA
cagaaagagggtaagagaagaaaaa

SEQ ID NO: 2919 - RNA, 25 nt, Homo sapiens
  source 1..25: mol_type = unassigned RNA
tggggaaggaatagaaacagaaaga

SEQ ID NO: 2920 - RNA, 25 nt, Homo sapiens
  source 1..25: mol_type = unassigned RNA
gtggggaaggaatagaaacagaaag

SEQ ID NO: 2921 - RNA, 25 nt, Homo sapiens
  source 1..25: mol_type = unassigned RNA
ggaagcactggggcatgagtgggga

SEQ ID NO: 2922 - RNA, 25 nt, Homo sapiens
  source 1..25: mol_type = unassigned RNA
caacggaagcactggggcatgagtg

SEQ ID NO: 2923 - RNA, 25 nt, Homo sapiens
  source 1..25: mol_type = unassigned RNA
ccaacggaagcactggggcatgagt

SEQ ID NO: 2924 - RNA, 25 nt, Homo sapiens
  source 1..25: mol_type = unassigned RNA
tccaacggaagcactggggcatgag

SEQ ID NO: 2925 - RNA, 25 nt, Homo sapiens
  source 1..25: mol_type = unassigned RNA
gcgcatgtgtccaacggaagcactg

SEQ ID NO: 2926 - RNA, 25 nt, Homo sapiens
  source 1..25: mol_type = unassigned RNA
tgcgcatgtgtccaacggaagcact

SEQ ID NO: 2927 - RNA, 25 nt, Homo sapiens
  source 1..25: mol_type = unassigned RNA
atgcgcatgtgtccaacggaagcac

SEQ ID NO: 2928 - RNA, 25 nt, Homo sapiens
  source 1..25: mol_type = unassigned RNA
gaccgtaaaatgcgcatgtgtccaa

SEQ ID NO: 2929 - RNA, 25 nt, Homo sapiens
  source 1..25: mol_type = unassigned RNA
aggtcagaaatctttcaagccctgc

SEQ ID NO: 2930 - RNA, 25 nt, Homo sapiens
  source 1..25: mol_type = unassigned RNA
tgataccaaatcactggaccttaga

SEQ ID NO: 2931 - RNA, 25 nt, Homo sapiens
  source 1..25: mol_type = unassigned RNA
cttagatcttctgataccaaatcac

SEQ ID NO: 2932 - RNA, 25 nt, Homo sapiens
  source 1..25: mol_type = unassigned RNA
cacgcttctttaaatggcagagaga

SEQ ID NO: 2933 - RNA, 25 nt, Homo sapiens
  source 1..25: mol_type = unassigned RNA
ggaaattgcaacacgcttctttaaa

SEQ ID NO: 2934 - RNA, 25 nt, Homo sapiens
  source 1..25: mol_type = unassigned RNA
aggcgaatcactttcacttctgctg

SEQ ID NO: 2935 - RNA, 25 nt, Homo sapiens
  source 1..25: mol_type = unassigned RNA
gaggcgaatcactttcacttctgct

SEQ ID NO: 2936 - RNA, 25 nt, Homo sapiens
  source 1..25: mol_type = unassigned RNA
agaggcgaatcactttcacttctgc

SEQ ID NO: 2937 - RNA, 25 nt, Homo sapiens
  source 1..25: mol_type = unassigned RNA
acacggaatgcagacatttgagtag

SEQ ID NO: 2938 - RNA, 25 nt, Homo sapiens
  source 1..25: mol_type = unassigned RNA
agggtttgctttcaccccattcaaa

SEQ ID NO: 2939 - RNA, 25 nt, Homo sapiens
  source 1..25: mol_type = unassigned RNA
cctattgtgtggtcaggttatgtaa

SEQ ID NO: 2940 - RNA, 25 nt, Homo sapiens
  source 1..25: mol_type = unassigned RNA
tcctattgtgtggtcaggttatgta

SEQ ID NO: 2941 - RNA, 25 nt, Homo sapiens
  source 1..25: mol_type = unassigned RNA
tttcatttcctcctattgtgtggtc

SEQ ID NO: 2942 - RNA, 25 nt, Homo sapiens
  source 1..25: mol_type = unassigned RNA
cgggcctggcgcaacgctgagcagc

SEQ ID NO: 2943 - RNA, 25 nt, Homo sapiens
  source 1..25: mol_type = unassigned RNA
cgctgagcagctggcgcgtcccgcg

SEQ ID NO: 2944 - RNA, 25 nt, Homo sapiens
  source 1..25: mol_type = unassigned RNA
ggccccagttctgcgcagcttcccg

SEQ ID NO: 2945 - RNA, 25 nt, Homo sapiens
  source 1..25: mol_type = unassigned RNA
accagccgcgcttctgtccgcctgc

SEQ ID NO: 2946 - RNA, 25 nt, Homo sapiens
  source 1..25: mol_type = unassigned RNA
gccgcgcttctgtccgcctgcaggt

SEQ ID NO: 2947 - RNA, 25 nt, Homo sapiens
  source 1..25: mol_type = unassigned RNA
ccgcgcttctgtccgcctgcaggta

SEQ ID NO: 2948 - RNA, 25 nt, Homo sapiens
  source 1..25: mol_type = unassigned RNA
gcaggtagggagcgttgttcctccg

SEQ ID NO: 2949 - RNA, 25 nt, Homo sapiens
  source 1..25: mol_type = unassigned RNA
caggtagggagcgttgttcctccgc

SEQ ID NO: 2950 - RNA, 25 nt, Homo sapiens
  source 1..25: mol_type = unassigned RNA
cagcgttgcgccaggcccggaggcg

SEQ ID NO: 2951 - RNA, 25 nt, Homo sapiens
  source 1..25: mol_type = unassigned RNA
tcagcgttgcgccaggcccggaggc

SEQ ID NO: 2952 - RNA, 25 nt, Homo sapiens
  source 1..25: mol_type = unassigned RNA
ctcagcgttgcgccaggcccggagg

SEQ ID NO: 2953 - RNA, 25 nt, Homo sapiens
  source 1..25: mol_type = unassigned RNA
ctgctcagcgttgcgccaggcccgg

SEQ ID NO: 2954 - RNA, 25 nt, Homo sapiens
  source 1..25: mol_type = unassigned RNA
cagctgctcagcgttgcgccaggcc

SEQ ID NO: 2955 - RNA, 25 nt, Homo sapiens
  source 1..25: mol_type = unassigned RNA
cgcgccagctgctcagcgttgcgcc

SEQ ID NO: 2956 - RNA, 25 nt, Homo sapiens
  source 1..25: mol_type = unassigned RNA
aagctgcgcagaactggggccgcgc

SEQ ID NO: 2957 - RNA, 25 nt, Homo sapiens
  source 1..25: mol_type = unassigned RNA
gaagctgcgcagaactggggccgcg

SEQ ID NO: 2958 - RNA, 25 nt, Homo sapiens
  source 1..25: mol_type = unassigned RNA
agcctcgggaagctgcgcagaactg

SEQ ID NO: 2959 - RNA, 25 nt, Homo sapiens
  source 1..25: mol_type = unassigned RNA
gagcctcgggaagctgcgcagaact

SEQ ID NO: 2960 - RNA, 25 nt, Homo sapiens
  source 1..25: mol_type = unassigned RNA
ggagcctcgggaagctgcgcagaac

SEQ ID NO: 2961 - RNA, 25 nt, Homo sapiens
  source 1..25: mol_type = unassigned RNA
agaagcgcggctggtgcggagcctc

SEQ ID NO: 2962 - RNA, 25 nt, Homo sapiens
  source 1..25: mol_type = unassigned RNA
cagaagcgcggctggtgcggagcct

SEQ ID NO: 2963 - RNA, 25 nt, Homo sapiens
  source 1..25: mol_type = unassigned RNA
caggcggacagaagcgcggctggtg

SEQ ID NO: 2964 - RNA, 25 nt, Homo sapiens
  source 1..25: mol_type = unassigned RNA
acctgcaggcggacagaagcgcggc

SEQ ID NO: 2965 - RNA, 25 nt, Homo sapiens
  source 1..25: mol_type = unassigned RNA
ccctacctgcaggcggacagaagcg

SEQ ID NO: 2966 - RNA, 25 nt, Homo sapiens
  source 1..25: mol_type = unassigned RNA
aggaacaacgctccctacctgcagg

SEQ ID NO: 2967 - RNA, 25 nt, Homo sapiens
  source 1..25: mol_type = unassigned RNA
cggaggaacaacgctccctacctgc

SEQ ID NO: 2968 - RNA, 25 nt, Homo sapiens
  source 1..25: mol_type = unassigned RNA
ataattagggcattccagaaagatg

SEQ ID NO: 2969 - RNA, 25 nt, Homo sapiens
  source 1..25: mol_type = unassigned RNA
tgctgtctttatattcatgacctac

SEQ ID NO: 2970 - RNA, 25 nt, Homo sapiens
  source 1..25: mol_type = unassigned RNA
tcatgacctactggcatttgctgaa

SEQ ID NO: 2971 - RNA, 25 nt, Homo sapiens
  source 1..25: mol_type = unassigned RNA
tcatctttctggaatgccctaatta

SEQ ID NO: 2972 - RNA, 25 nt, Homo sapiens
  source 1..25: mol_type = unassigned RNA
aagacagcaaatatcctcatctttc

SEQ ID NO: 2973 - RNA, 25 nt, Homo sapiens
  source 1..25: mol_type = unassigned RNA
gtcttaccgttcagcaaatgccagt

SEQ ID NO: 2974 - RNA, 25 nt, Homo sapiens
  source 1..25: mol_type = unassigned RNA
tctttctttttagcatttactgtca

SEQ ID NO: 2975 - RNA, 25 nt, Homo sapiens
  source 1..25: mol_type = unassigned RNA
ttagcatttactgtcacggttccca

SEQ ID NO: 2976 - RNA, 25 nt, Homo sapiens
  source 1..25: mol_type = unassigned RNA
gtcacggttcccaaggacctatatg

SEQ ID NO: 2977 - RNA, 25 nt, Homo sapiens
  source 1..25: mol_type = unassigned RNA
ccaaggacctatatgtggtagagta

SEQ ID NO: 2978 - RNA, 25 nt, Homo sapiens
  source 1..25: mol_type = unassigned RNA
ttcccagtagaaaaacaattagacc

SEQ ID NO: 2979 - RNA, 25 nt, Homo sapiens
  source 1..25: mol_type = unassigned RNA
agacctggctgcactaattgtctat

SEQ ID NO: 2980 - RNA, 25 nt, Homo sapiens
  source 1..25: mol_type = unassigned RNA
gacctggctgcactaattgtctatt

SEQ ID NO: 2981 - RNA, 25 nt, Homo sapiens
  source 1..25: mol_type = unassigned RNA
gctgcactaattgtctattgggaaa

SEQ ID NO: 2982 - RNA, 25 nt, Homo sapiens
  source 1..25: mol_type = unassigned RNA
gcactaattgtctattgggaaatgg

SEQ ID NO: 2983 - RNA, 25 nt, Homo sapiens
  source 1..25: mol_type = unassigned RNA
ataagaacattattcaatttgtgca

SEQ ID NO: 2984 - RNA, 25 nt, Homo sapiens
  source 1..25: mol_type = unassigned RNA
aacattattcaatttgtgcatggag

SEQ ID NO: 2985 - RNA, 25 nt, Homo sapiens
  source 1..25: mol_type = unassigned RNA
tttgtgcatggagaggaagacctga

SEQ ID NO: 2986 - RNA, 25 nt, Homo sapiens
  source 1..25: mol_type = unassigned RNA
ggttcagcatagtagctacagacag

SEQ ID NO: 2987 - RNA, 25 nt, Homo sapiens
  source 1..25: mol_type = unassigned RNA
gttcagcatagtagctacagacaga

SEQ ID NO: 2988 - RNA, 25 nt, Homo sapiens
  source 1..25: mol_type = unassigned RNA
gcatagtagctacagacagagggcc

SEQ ID NO: 2989 - RNA, 25 nt, Homo sapiens
  source 1..25: mol_type = unassigned RNA
tacagacagagggcccggctgttga

SEQ ID NO: 2990 - RNA, 25 nt, Homo sapiens
  source 1..25: mol_type = unassigned RNA
cggctgttgaaggaccagctctccc

SEQ ID NO: 2991 - RNA, 25 nt, Homo sapiens
  source 1..25: mol_type = unassigned RNA
ggctgttgaaggaccagctctccct

SEQ ID NO: 2992 - RNA, 25 nt, Homo sapiens
  source 1..25: mol_type = unassigned RNA
cttcagatcacagatgtgaaattgc

SEQ ID NO: 2993 - RNA, 25 nt, Homo sapiens
  source 1..25: mol_type = unassigned RNA
tcacagatgtgaaattgcaggatgc

SEQ ID NO: 2994 - RNA, 25 nt, Homo sapiens
  source 1..25: mol_type = unassigned RNA
cacagatgtgaaattgcaggatgca

SEQ ID NO: 2995 - RNA, 25 nt, Homo sapiens
  source 1..25: mol_type = unassigned RNA
acagatgtgaaattgcaggatgcag

SEQ ID NO: 2996 - RNA, 25 nt, Homo sapiens
  source 1..25: mol_type = unassigned RNA
gggtgtaccgctgcatgatcagcta

SEQ ID NO: 2997 - RNA, 25 nt, Homo sapiens
  source 1..25: mol_type = unassigned RNA
tgtaccgctgcatgatcagctatgg

SEQ ID NO: 2998 - RNA, 25 nt, Homo sapiens
  source 1..25: mol_type = unassigned RNA
acaagcgaattactgtgaaagtcaa

SEQ ID NO: 2999 - RNA, 25 nt, Homo sapiens
  source 1..25: mol_type = unassigned RNA
aatggtaagaattattatagatgag

SEQ ID NO: 3000 - RNA, 25 nt, Homo sapiens
  source 1..25: mol_type = unassigned RNA
tgacagtaaatgctaaaaagaaaga

SEQ ID NO: 3001 - RNA, 25 nt, Homo sapiens
  source 1..25: mol_type = unassigned RNA
catactctaccacatataggtcctt

SEQ ID NO: 3002 - RNA, 25 nt, Homo sapiens
  source 1..25: mol_type = unassigned RNA
ccatactctaccacatataggtcct

SEQ ID NO: 3003 - RNA, 25 nt, Homo sapiens
  source 1..25: mol_type = unassigned RNA
attgctaccatactctaccacatat

SEQ ID NO: 3004 - RNA, 25 nt, Homo sapiens
  source 1..25: mol_type = unassigned RNA
agccaggtctaattgtttttctact

SEQ ID NO: 3005 - RNA, 25 nt, Homo sapiens
  source 1..25: mol_type = unassigned RNA
cagccaggtctaattgtttttctac

SEQ ID NO: 3006 - RNA, 25 nt, Homo sapiens
  source 1..25: mol_type = unassigned RNA
ttcccaatagacaattagtgcagcc

SEQ ID NO: 3007 - RNA, 25 nt, Homo sapiens
  source 1..25: mol_type = unassigned RNA
tctgtagctactatgctgaaccttc

SEQ ID NO: 3008 - RNA, 25 nt, Homo sapiens
  source 1..25: mol_type = unassigned RNA
agggagagctggtccttcaacagcc

SEQ ID NO: 3009 - RNA, 25 nt, Homo sapiens
  source 1..25: mol_type = unassigned RNA
cagggagagctggtccttcaacagc

SEQ ID NO: 3010 - RNA, 25 nt, Homo sapiens
  source 1..25: mol_type = unassigned RNA
aagtgcagcatttcccagggagagc

SEQ ID NO: 3011 - RNA, 25 nt, Homo sapiens
  source 1..25: mol_type = unassigned RNA
gtgatctgaagtgcagcatttccca

SEQ ID NO: 3012 - RNA, 25 nt, Homo sapiens
  source 1..25: mol_type = unassigned RNA
tgtgatctgaagtgcagcatttccc

SEQ ID NO: 3013 - RNA, 25 nt, Homo sapiens
  source 1..25: mol_type = unassigned RNA
ggcaccaccatagctgatcatgcag

SEQ ID NO: 3014 - RNA, 25 nt, Homo sapiens
  source 1..25: mol_type = unassigned RNA
actttcacagtaattcgcttgtagt

SEQ ID NO: 3015 - RNA, 25 nt, Homo sapiens
  source 1..25: mol_type = unassigned RNA
tacaacaaaatcaaccaaagaattt

SEQ ID NO: 3016 - RNA, 25 nt, Homo sapiens
  source 1..25: mol_type = unassigned RNA
aaaatcaaccaaagaattttggttg

SEQ ID NO: 3017 - RNA, 25 nt, Homo sapiens
  source 1..25: mol_type = unassigned RNA
acctctgaacatgaactgacatgtc

SEQ ID NO: 3018 - RNA, 25 nt, Homo sapiens
  source 1..25: mol_type = unassigned RNA
gaacatgaactgacatgtcaggctg

SEQ ID NO: 3019 - RNA, 25 nt, Homo sapiens
  source 1..25: mol_type = unassigned RNA
aacatgaactgacatgtcaggctga

SEQ ID NO: 3020 - RNA, 25 nt, Homo sapiens
  source 1..25: mol_type = unassigned RNA
acatgtcaggctgagggctacccca

SEQ ID NO: 3021 - RNA, 25 nt, Homo sapiens
  source 1..25: mol_type = unassigned RNA
gggctaccccaaggccgaagtcatc

SEQ ID NO: 3022 - RNA, 25 nt, Homo sapiens
  source 1..25: mol_type = unassigned RNA
caagcagtgaccatcaagtcctgag

SEQ ID NO: 3023 - RNA, 25 nt, Homo sapiens
  source 1..25: mol_type = unassigned RNA
accaccaccaccaattccaagagag

SEQ ID NO: 3024 - RNA, 25 nt, Homo sapiens
  source 1..25: mol_type = unassigned RNA
taatgagattttctactgcactttt

SEQ ID NO: 3025 - RNA, 25 nt, Homo sapiens
  source 1..25: mol_type = unassigned RNA
tgcacttttaggagattagatcctg

SEQ ID NO: 3026 - RNA, 25 nt, Homo sapiens
  source 1..25: mol_type = unassigned RNA
cctgaggaaaaccatacagctgaat

SEQ ID NO: 3027 - RNA, 25 nt, Homo sapiens
  source 1..25: mol_type = unassigned RNA
accatacagctgaattggtcatccc

SEQ ID NO: 3028 - RNA, 25 nt, Homo sapiens
  source 1..25: mol_type = unassigned RNA
ttggttgattttgttgtatggggct

SEQ ID NO: 3029 - RNA, 25 nt, Homo sapiens
  source 1..25: mol_type = unassigned RNA
attctttggttgattttgttgtatg

SEQ ID NO: 3030 - RNA, 25 nt, Homo sapiens
  source 1..25: mol_type = unassigned RNA
aattctttggttgattttgttgtat

SEQ ID NO: 3031 - RNA, 25 nt, Homo sapiens
  source 1..25: mol_type = unassigned RNA
aaattctttggttgattttgttgta

SEQ ID NO: 3032 - RNA, 25 nt, Homo sapiens
  source 1..25: mol_type = unassigned RNA
gactggatccacaaccaaaattctt

SEQ ID NO: 3033 - RNA, 25 nt, Homo sapiens
  source 1..25: mol_type = unassigned RNA
atgtcagttcatgttcagaggtgac

SEQ ID NO: 3034 - RNA, 25 nt, Homo sapiens
  source 1..25: mol_type = unassigned RNA
gcctgacatgtcagttcatgttcag

SEQ ID NO: 3035 - RNA, 25 nt, Homo sapiens
  source 1..25: mol_type = unassigned RNA
gcttgtccagatgacttcggccttg

SEQ ID NO: 3036 - RNA, 25 nt, Homo sapiens
  source 1..25: mol_type = unassigned RNA
tgcttgtccagatgacttcggcctt

SEQ ID NO: 3037 - RNA, 25 nt, Homo sapiens
  source 1..25: mol_type = unassigned RNA
ctgcttgtccagatgacttcggcct

SEQ ID NO: 3038 - RNA, 25 nt, Homo sapiens
  source 1..25: mol_type = unassigned RNA
tggtcactgcttgtccagatgactt

SEQ ID NO: 3039 - RNA, 25 nt, Homo sapiens
  source 1..25: mol_type = unassigned RNA
ggtggtcttaccactcaggacttga

SEQ ID NO: 3040 - RNA, 25 nt, Homo sapiens
  source 1..25: mol_type = unassigned RNA
attggtggtggtggtcttaccactc

SEQ ID NO: 3041 - RNA, 25 nt, Homo sapiens
  source 1..25: mol_type = unassigned RNA
tcctctctcttggaattggtggtgg

SEQ ID NO: 3042 - RNA, 25 nt, Homo sapiens
  source 1..25: mol_type = unassigned RNA
ttctcctctctcttggaattggtgg

SEQ ID NO: 3043 - RNA, 25 nt, Homo sapiens
  source 1..25: mol_type = unassigned RNA
agcttctcctctctcttggaattgg

SEQ ID NO: 3044 - RNA, 25 nt, Homo sapiens
  source 1..25: mol_type = unassigned RNA
aaaagcttctcctctctcttggaat

SEQ ID NO: 3045 - RNA, 25 nt, Homo sapiens
  source 1..25: mol_type = unassigned RNA
acattgaaaagcttctcctctctct

SEQ ID NO: 3046 - RNA, 25 nt, Homo sapiens
  source 1..25: mol_type = unassigned RNA
gttgttgtgttgattctcagtgtgc

SEQ ID NO: 3047 - RNA, 25 nt, Homo sapiens
  source 1..25: mol_type = unassigned RNA
ccaattcagctgtatggttttcctc

SEQ ID NO: 3048 - RNA, 25 nt, Homo sapiens
  source 1..25: mol_type = unassigned RNA
acctgggatgaccaattcagctgta

SEQ ID NO: 3049 - RNA, 25 nt, Homo sapiens
  source 1..25: mol_type = unassigned RNA
aatggacacattcagaatattacct

SEQ ID NO: 3050 - RNA, 25 nt, Homo sapiens
  source 1..25: mol_type = unassigned RNA
taatggacacattcagaatattacc

SEQ ID NO: 3051 - RNA, 25 nt, Homo sapiens
  source 1..25: mol_type = unassigned RNA
ttgttttgtttttcagaactacctc

SEQ ID NO: 3052 - RNA, 25 nt, Homo sapiens
  source 1..25: mol_type = unassigned RNA
acctctggcacatcctccaaatgaa

SEQ ID NO: 3053 - RNA, 25 nt, Homo sapiens
  source 1..25: mol_type = unassigned RNA
catcctccaaatgaaaggactcact

SEQ ID NO: 3054 - RNA, 25 nt, Homo sapiens
  source 1..25: mol_type = unassigned RNA
aatgaaaggactcacttggtaattc

SEQ ID NO: 3055 - RNA, 25 nt, Homo sapiens
  source 1..25: mol_type = unassigned RNA
atgaaaggactcacttggtaattct

SEQ ID NO: 3056 - RNA, 25 nt, Homo sapiens
  source 1..25: mol_type = unassigned RNA
ttctgggagccatcttattatgcct

SEQ ID NO: 3057 - RNA, 25 nt, Homo sapiens
  source 1..25: mol_type = unassigned RNA
tgacattcatcttccgtttaagaaa

SEQ ID NO: 3058 - RNA, 25 nt, Homo sapiens
  source 1..25: mol_type = unassigned RNA
aaaggtagtatttccttaattgcag

SEQ ID NO: 3059 - RNA, 25 nt, Homo sapiens
  source 1..25: mol_type = unassigned RNA
tcctttcatttggaggatgtgccag

SEQ ID NO: 3060 - RNA, 25 nt, Homo sapiens
  source 1..25: mol_type = unassigned RNA
ttaccaagtgagtcctttcatttgg

SEQ ID NO: 3061 - RNA, 25 nt, Homo sapiens
  source 1..25: mol_type = unassigned RNA
gaattaccaagtgagtcctttcatt

SEQ ID NO: 3062 - RNA, 25 nt, Homo sapiens
  source 1..25: mol_type = unassigned RNA
agtgctacaccaaggcataataaga

SEQ ID NO: 3063 - RNA, 25 nt, Homo sapiens
  source 1..25: mol_type = unassigned RNA
gaagatgaatgtcagtgctacacca

SEQ ID NO: 3064 - RNA, 25 nt, Homo sapiens
  source 1..25: mol_type = unassigned RNA
taaggaaatactaccttttcttaaa

SEQ ID NO: 3065 - RNA, 25 nt, Homo sapiens
  source 1..25: mol_type = unassigned RNA
atttctttttctcaagggagaatga

SEQ ID NO: 3066 - RNA, 25 nt, Homo sapiens
  source 1..25: mol_type = unassigned RNA
ggagaatgatggatgtgaaaaaatg

SEQ ID NO: 3067 - RNA, 25 nt, Homo sapiens
  source 1..25: mol_type = unassigned RNA
aagatacaaactcaaagaagcaaag

SEQ ID NO: 3068 - RNA, 25 nt, Homo sapiens
  source 1..25: mol_type = unassigned RNA
gaagcaaagtggtaagaatatcaga

SEQ ID NO: 3069 - RNA, 25 nt, Homo sapiens
  source 1..25: mol_type = unassigned RNA
aagtggtaagaatatcagaaggaat

SEQ ID NO: 3070 - RNA, 25 nt, Homo sapiens
  source 1..25: mol_type = unassigned RNA
agtggtaagaatatcagaaggaatt

SEQ ID NO: 3071 - RNA, 25 nt, Homo sapiens
  source 1..25: mol_type = unassigned RNA
actttgcttctttgagtttgtatct

SEQ ID NO: 3072 - RNA, 25 nt, Homo sapiens
  source 1..25: mol_type = unassigned RNA
tattatcactctccagatacacatt

SEQ ID NO: 3073 - RNA, 25 nt, Homo sapiens
  source 1..25: mol_type = unassigned RNA
tatcactctccagatacacatttgg

SEQ ID NO: 3074 - RNA, 25 nt, Homo sapiens
  source 1..25: mol_type = unassigned RNA
atttggaggagacgtaatccagcat

SEQ ID NO: 3075 - RNA, 25 nt, Homo sapiens
  source 1..25: mol_type = unassigned RNA
gcattggaacttctgatcttcaagc

SEQ ID NO: 3076 - RNA, 25 nt, Homo sapiens
  source 1..25: mol_type = unassigned RNA
cattggaacttctgatcttcaagca

SEQ ID NO: 3077 - RNA, 25 nt, Homo sapiens
  source 1..25: mol_type = unassigned RNA
tcttcaagcagggattctcaacctg

SEQ ID NO: 3078 - RNA, 25 nt, Homo sapiens
  source 1..25: mol_type = unassigned RNA
agcagggattctcaacctgtggttt

SEQ ID NO: 3079 - RNA, 25 nt, Homo sapiens
  source 1..25: mol_type = unassigned RNA
gcagggattctcaacctgtggttta

SEQ ID NO: 3080 - RNA, 25 nt, Homo sapiens
  source 1..25: mol_type = unassigned RNA
cagggattctcaacctgtggtttag

SEQ ID NO: 3081 - RNA, 25 nt, Homo sapiens
  source 1..25: mol_type = unassigned RNA
ctcaacctgtggtttaggggttcat

SEQ ID NO: 3082 - RNA, 25 nt, Homo sapiens
  source 1..25: mol_type = unassigned RNA
tcaacctgtggtttaggggttcatc

SEQ ID NO: 3083 - RNA, 25 nt, Homo sapiens
  source 1..25: mol_type = unassigned RNA
caacctgtggtttaggggttcatcg

SEQ ID NO: 3084 - RNA, 25 nt, Homo sapiens
  source 1..25: mol_type = unassigned RNA
gttcatcggggctgagcgtgacaag

SEQ ID NO: 3085 - RNA, 25 nt, Homo sapiens
  source 1..25: mol_type = unassigned RNA
atcggggctgagcgtgacaagagga

SEQ ID NO: 3086 - RNA, 25 nt, Homo sapiens
  source 1..25: mol_type = unassigned RNA
ggctgagcgtgacaagaggaaggaa

SEQ ID NO: 3087 - RNA, 25 nt, Homo sapiens
  source 1..25: mol_type = unassigned RNA
gctgagcgtgacaagaggaaggaat

SEQ ID NO: 3088 - RNA, 25 nt, Homo sapiens
  source 1..25: mol_type = unassigned RNA
gtgacaagaggaaggaatgggcccg

SEQ ID NO: 3089 - RNA, 25 nt, Homo sapiens
  source 1..25: mol_type = unassigned RNA
tgacaagaggaaggaatgggcccgt

SEQ ID NO: 3090 - RNA, 25 nt, Homo sapiens
  source 1..25: mol_type = unassigned RNA
aggaaggaatgggcccgtgggatgc

SEQ ID NO: 3091 - RNA, 25 nt, Homo sapiens
  source 1..25: mol_type = unassigned RNA
atgggcccgtgggatgcaggcaatg

SEQ ID NO: 3092 - RNA, 25 nt, Homo sapiens
  source 1..25: mol_type = unassigned RNA
tgggcccgtgggatgcaggcaatgt

SEQ ID NO: 3093 - RNA, 25 nt, Homo sapiens
  source 1..25: mol_type = unassigned RNA
ggatgcaggcaatgtgggacttaaa

SEQ ID NO: 3094 - RNA, 25 nt, Homo sapiens
  source 1..25: mol_type = unassigned RNA
acttaaaaggcccaagcactgaaaa

SEQ ID NO: 3095 - RNA, 25 nt, Homo sapiens
  source 1..25: mol_type = unassigned RNA
aggcccaagcactgaaaatggaacc

SEQ ID NO: 3096 - RNA, 25 nt, Homo sapiens
  source 1..25: mol_type = unassigned RNA
tgaaaatggaacctggcgaaagcag

SEQ ID NO: 3097 - RNA, 25 nt, Homo sapiens
  source 1..25: mol_type = unassigned RNA
aaatggaacctggcgaaagcagagg

SEQ ID NO: 3098 - RNA, 25 nt, Homo sapiens
  source 1..25: mol_type = unassigned RNA
agcagaggaggagaatgaagaaaga

SEQ ID NO: 3099 - RNA, 25 nt, Homo sapiens
  source 1..25: mol_type = unassigned RNA
agaatgaagaaagatggagtcaaac

SEQ ID NO: 3100 - RNA, 25 nt, Homo sapiens
  source 1..25: mol_type = unassigned RNA
gaatgaagaaagatggagtcaaaca

SEQ ID NO: 3101 - RNA, 25 nt, Homo sapiens
  source 1..25: mol_type = unassigned RNA
gaaagatggagtcaaacagggagcc

SEQ ID NO: 3102 - RNA, 25 nt, Homo sapiens
  source 1..25: mol_type = unassigned RNA
agatggagtcaaacagggagcctgg

SEQ ID NO: 3103 - RNA, 25 nt, Homo sapiens
  source 1..25: mol_type = unassigned RNA
gatggagtcaaacagggagcctgga

SEQ ID NO: 3104 - RNA, 25 nt, Homo sapiens
  source 1..25: mol_type = unassigned RNA
agaccttgatactttcaaatgcctg

SEQ ID NO: 3105 - RNA, 25 nt, Homo sapiens
  source 1..25: mol_type = unassigned RNA
gaccttgatactttcaaatgcctga

SEQ ID NO: 3106 - RNA, 25 nt, Homo sapiens
  source 1..25: mol_type = unassigned RNA
accttgatactttcaaatgcctgag

SEQ ID NO: 3107 - RNA, 25 nt, Homo sapiens
  source 1..25: mol_type = unassigned RNA
tgaggggctcatcgacgcctgtgac

SEQ ID NO: 3108 - RNA, 25 nt, Homo sapiens
  source 1..25: mol_type = unassigned RNA
gaggggctcatcgacgcctgtgaca

SEQ ID NO: 3109 - RNA, 25 nt, Homo sapiens
  source 1..25: mol_type = unassigned RNA
tcatcgacgcctgtgacagggagaa

SEQ ID NO: 3110 - RNA, 25 nt, Homo sapiens
  source 1..25: mol_type = unassigned RNA
cagggagaaaggatacttctgaaca

SEQ ID NO: 3111 - RNA, 25 nt, Homo sapiens
  source 1..25: mol_type = unassigned RNA
aagcaaatcatccattgctcatcct

SEQ ID NO: 3112 - RNA, 25 nt, Homo sapiens
  source 1..25: mol_type = unassigned RNA
tcatccattgctcatcctaggaaga

SEQ ID NO: 3113 - RNA, 25 nt, Homo sapiens
  source 1..25: mol_type = unassigned RNA
catccattgctcatcctaggaagac

SEQ ID NO: 3114 - RNA, 25 nt, Homo sapiens
  source 1..25: mol_type = unassigned RNA
agacgggttgagaatccctaatttg

SEQ ID NO: 3115 - RNA, 25 nt, Homo sapiens
  source 1..25: mol_type = unassigned RNA
gacgggttgagaatccctaatttga

SEQ ID NO: 3116 - RNA, 25 nt, Homo sapiens
  source 1..25: mol_type = unassigned RNA
tctgcatgactgagagtctcagtgt

SEQ ID NO: 3117 - RNA, 25 nt, Homo sapiens
  source 1..25: mol_type = unassigned RNA
atgactgagagtctcagtgttggaa

SEQ ID NO: 3118 - RNA, 25 nt, Homo sapiens
  source 1..25: mol_type = unassigned RNA
tgactgagagtctcagtgttggaac

SEQ ID NO: 3119 - RNA, 25 nt, Homo sapiens
  source 1..25: mol_type = unassigned RNA
ttttcctatttattttgagtctgtg

SEQ ID NO: 3120 - RNA, 25 nt, Homo sapiens
  source 1..25: mol_type = unassigned RNA
gtgaggtcttcttgtcatgtgagtg

SEQ ID NO: 3121 - RNA, 25 nt, Homo sapiens
  source 1..25: mol_type = unassigned RNA
tgatttgctcacatctagtaaaaca

SEQ ID NO: 3122 - RNA, 25 nt, Homo sapiens
  source 1..25: mol_type = unassigned RNA
tctagtaaaacatggagtatttgta

SEQ ID NO: 3123 - RNA, 25 nt, Homo sapiens
  source 1..25: mol_type = unassigned RNA
aaacatggagtatttgtaaggtgct

SEQ ID NO: 3124 - RNA, 25 nt, Homo sapiens
  source 1..25: mol_type = unassigned RNA
ctcctctataactacaagtatacat

SEQ ID NO: 3125 - RNA, 25 nt, Homo sapiens
  source 1..25: mol_type = unassigned RNA
attggaagcataaagatcaaaccgt

SEQ ID NO: 3126 - RNA, 25 nt, Homo sapiens
  source 1..25: mol_type = unassigned RNA
ataaagatcaaaccgttggttgcat

SEQ ID NO: 3127 - RNA, 25 nt, Homo sapiens
  source 1..25: mol_type = unassigned RNA
acctttatttaacccattaatactc

SEQ ID NO: 3128 - RNA, 25 nt, Homo sapiens
  source 1..25: mol_type = unassigned RNA
ggaaaacccgagcagtgttgccaag

SEQ ID NO: 3129 - RNA, 25 nt, Homo sapiens
  source 1..25: mol_type = unassigned RNA
aaacccgagcagtgttgccaagagg

SEQ ID NO: 3130 - RNA, 25 nt, Homo sapiens
  source 1..25: mol_type = unassigned RNA
agcagtgttgccaagaggaggaaat

SEQ ID NO: 3131 - RNA, 25 nt, Homo sapiens
  source 1..25: mol_type = unassigned RNA
gccaagaggaggaaataggccaatg

SEQ ID NO: 3132 - RNA, 25 nt, Homo sapiens
  source 1..25: mol_type = unassigned RNA
gaggaggaaataggccaatgtggtc

SEQ ID NO: 3133 - RNA, 25 nt, Homo sapiens
  source 1..25: mol_type = unassigned RNA
aggaggaaataggccaatgtggtct

SEQ ID NO: 3134 - RNA, 25 nt, Homo sapiens
  source 1..25: mol_type = unassigned RNA
ggaaataggccaatgtggtctggga

SEQ ID NO: 3135 - RNA, 25 nt, Homo sapiens
  source 1..25: mol_type = unassigned RNA
ataggccaatgtggtctgggacggt

SEQ ID NO: 3136 - RNA, 25 nt, Homo sapiens
  source 1..25: mol_type = unassigned RNA
cagagtaattttcatttacaaagag

SEQ ID NO: 3137 - RNA, 25 nt, Homo sapiens
  source 1..25: mol_type = unassigned RNA
gtaattttcatttacaaagagaggt

SEQ ID NO: 3138 - RNA, 25 nt, Homo sapiens
  source 1..25: mol_type = unassigned RNA
ttaaaataaccctgaaaaataacac

SEQ ID NO: 3139 - RNA, 25 nt, Homo sapiens
  source 1..25: mol_type = unassigned RNA
atctaatgcttgtttatatagtgtc

SEQ ID NO: 3140 - RNA, 25 nt, Homo sapiens
  source 1..25: mol_type = unassigned RNA
attttagtgtttcttatatagcaga

SEQ ID NO: 3141 - RNA, 25 nt, Homo sapiens
  source 1..25: mol_type = unassigned RNA
cagatggaatgaatttgaagttccc

SEQ ID NO: 3142 - RNA, 25 nt, Homo sapiens
  source 1..25: mol_type = unassigned RNA
agatggaatgaatttgaagttccca

SEQ ID NO: 3143 - RNA, 25 nt, Homo sapiens
  source 1..25: mol_type = unassigned RNA
aatgaatttgaagttcccagggctg

SEQ ID NO: 3144 - RNA, 25 nt, Homo sapiens
  source 1..25: mol_type = unassigned RNA
ccaccatttgttaagtatttgctct

SEQ ID NO: 3145 - RNA, 25 nt, Homo sapiens
  source 1..25: mol_type = unassigned RNA
taagtatttgctctaggacagagtt

SEQ ID NO: 3146 - RNA, 25 nt, Homo sapiens
  source 1..25: mol_type = unassigned RNA
ttggatttgtttatgtttgctcaaa

SEQ ID NO: 3147 - RNA, 25 nt, Homo sapiens
  source 1..25: mol_type = unassigned RNA
ttatgtttgctcaaaaggagaccca

SEQ ID NO: 3148 - RNA, 25 nt, Homo sapiens
  source 1..25: mol_type = unassigned RNA
tatgtttgctcaaaaggagacccat

SEQ ID NO: 3149 - RNA, 25 nt, Homo sapiens
  source 1..25: mol_type = unassigned RNA
tcaaaaggagacccatgggctctcc

SEQ ID NO: 3150 - RNA, 25 nt, Homo sapiens
  source 1..25: mol_type = unassigned RNA
caaaaggagacccatgggctctcca

SEQ ID NO: 3151 - RNA, 25 nt, Homo sapiens
  source 1..25: mol_type = unassigned RNA
taactctgtatgacagaatcatgtc

SEQ ID NO: 3152 - RNA, 25 nt, Homo sapiens
  source 1..25: mol_type = unassigned RNA
tacttgcaaaatcacattttctttc

SEQ ID NO: 3153 - RNA, 25 nt, Homo sapiens
  source 1..25: mol_type = unassigned RNA
aatcacattttctttctggaaattc

SEQ ID NO: 3154 - RNA, 25 nt, Homo sapiens
  source 1..25: mol_type = unassigned RNA
gtcatcactacacagccctcctaag

SEQ ID NO: 3155 - RNA, 25 nt, Homo sapiens
  source 1..25: mol_type = unassigned RNA
tacacagccctcctaagaggcttcc

SEQ ID NO: 3156 - RNA, 25 nt, Homo sapiens
  source 1..25: mol_type = unassigned RNA
acagccctcctaagaggcttcctgg

SEQ ID NO: 3157 - RNA, 25 nt, Homo sapiens
  source 1..25: mol_type = unassigned RNA
tggaggtttcgagattcagatgccc

SEQ ID NO: 3158 - RNA, 25 nt, Homo sapiens
  source 1..25: mol_type = unassigned RNA
ggaggtttcgagattcagatgccct

SEQ ID NO: 3159 - RNA, 25 nt, Homo sapiens
  source 1..25: mol_type = unassigned RNA
agatcccagagtttcctttccctct

SEQ ID NO: 3160 - RNA, 25 nt, Homo sapiens
  source 1..25: mol_type = unassigned RNA
tttcctttccctcttggccatattc

SEQ ID NO: 3161 - RNA, 25 nt, Homo sapiens
  source 1..25: mol_type = unassigned RNA
tggccatattctggtgtcaatgaca

SEQ ID NO: 3162 - RNA, 25 nt, Homo sapiens
  source 1..25: mol_type = unassigned RNA
ctggtgtcaatgacaaggagtacct

SEQ ID NO: 3163 - RNA, 25 nt, Homo sapiens
  source 1..25: mol_type = unassigned RNA
agtaccttggctttgccacatgtca

SEQ ID NO: 3164 - RNA, 25 nt, Homo sapiens
  source 1..25: mol_type = unassigned RNA
tgtacatgtgcatttgtacagtaat

SEQ ID NO: 3165 - RNA, 25 nt, Homo sapiens
  source 1..25: mol_type = unassigned RNA
tgacagtgttctttgtgtgaattac

SEQ ID NO: 3166 - RNA, 25 nt, Homo sapiens
  source 1..25: mol_type = unassigned RNA
ttgtgtgaattacaggcaagaattg

SEQ ID NO: 3167 - RNA, 25 nt, Homo sapiens
  source 1..25: mol_type = unassigned RNA
tacaggcaagaattgtggctgagca

SEQ ID NO: 3168 - RNA, 25 nt, Homo sapiens
  source 1..25: mol_type = unassigned RNA
attcctaagtcctaactcctccttg

SEQ ID NO: 3169 - RNA, 25 nt, Homo sapiens
  source 1..25: mol_type = unassigned RNA
aagtcctaactcctccttgtggtgt

SEQ ID NO: 3170 - RNA, 25 nt, Homo sapiens
  source 1..25: mol_type = unassigned RNA
tcctccttgtggtgttggatttgta

SEQ ID NO: 3171 - RNA, 25 nt, Homo sapiens
  source 1..25: mol_type = unassigned RNA
cttttgtctcatgtttcatcgtaaa

SEQ ID NO: 3172 - RNA, 25 nt, Homo sapiens
  source 1..25: mol_type = unassigned RNA
tctcatgtttcatcgtaaatggcat

SEQ ID NO: 3173 - RNA, 25 nt, Homo sapiens
  source 1..25: mol_type = unassigned RNA
aaatattcttatttattttgttact

SEQ ID NO: 3174 - RNA, 25 nt, Homo sapiens
  source 1..25: mol_type = unassigned RNA
taaaatgttcagtttaacatcccag

SEQ ID NO: 3175 - RNA, 25 nt, Homo sapiens
  source 1..25: mol_type = unassigned RNA
taacatcccagtggagaaagttact

SEQ ID NO: 3176 - RNA, 25 nt, Homo sapiens
  source 1..25: mol_type = unassigned RNA
attacgtctcctccaaatgtgtatc

SEQ ID NO: 3177 - RNA, 25 nt, Homo sapiens
  source 1..25: mol_type = unassigned RNA
gcttgaagatcagaagttccaatgc

SEQ ID NO: 3178 - RNA, 25 nt, Homo sapiens
  source 1..25: mol_type = unassigned RNA
cagccccgatgaacccctaaaccac

SEQ ID NO: 3179 - RNA, 25 nt, Homo sapiens
  source 1..25: mol_type = unassigned RNA
aagtcccacattgcctgcatcccac

SEQ ID NO: 3180 - RNA, 25 nt, Homo sapiens
  source 1..25: mol_type = unassigned RNA
taagtcccacattgcctgcatccca

SEQ ID NO: 3181 - RNA, 25 nt, Homo sapiens
  source 1..25: mol_type = unassigned RNA
tcgccaggttccattttcagtgctt

SEQ ID NO: 3182 - RNA, 25 nt, Homo sapiens
  source 1..25: mol_type = unassigned RNA
ttcgccaggttccattttcagtgct

SEQ ID NO: 3183 - RNA, 25 nt, Homo sapiens
  source 1..25: mol_type = unassigned RNA
ttcattctcctcctctgctttcgcc

SEQ ID NO: 3184 - RNA, 25 nt, Homo sapiens
  source 1..25: mol_type = unassigned RNA
tttgaaagtatcaaggtctccctcc

SEQ ID NO: 3185 - RNA, 25 nt, Homo sapiens
  source 1..25: mol_type = unassigned RNA
gcccctcaggcatttgaaagtatca

SEQ ID NO: 3186 - RNA, 25 nt, Homo sapiens
  source 1..25: mol_type = unassigned RNA
tgtcacaggcgtcgatgagcccctc

SEQ ID NO: 3187 - RNA, 25 nt, Homo sapiens
  source 1..25: mol_type = unassigned RNA
cagaagtatcctttctccctgtcac

SEQ ID NO: 3188 - RNA, 25 nt, Homo sapiens
  source 1..25: mol_type = unassigned RNA
gatgagcaatggatgatttgcttgg

SEQ ID NO: 3189 - RNA, 25 nt, Homo sapiens
  source 1..25: mol_type = unassigned RNA
taggatgagcaatggatgatttgct

SEQ ID NO: 3190 - RNA, 25 nt, Homo sapiens
  source 1..25: mol_type = unassigned RNA
caacccgtcttcctaggatgagcaa

SEQ ID NO: 3191 - RNA, 25 nt, Homo sapiens
  source 1..25: mol_type = unassigned RNA
ttagggattctcaacccgtcttcct

SEQ ID NO: 3192 - RNA, 25 nt, Homo sapiens
  source 1..25: mol_type = unassigned RNA
tctgcaggaactgaccctcaaatta

SEQ ID NO: 3193 - RNA, 25 nt, Homo sapiens
  source 1..25: mol_type = unassigned RNA
ttctgcaggaactgaccctcaaatt

SEQ ID NO: 3194 - RNA, 25 nt, Homo sapiens
  source 1..25: mol_type = unassigned RNA
gagtggaggcaaagggcacttctgc

SEQ ID NO: 3195 - RNA, 25 nt, Homo sapiens
  source 1..25: mol_type = unassigned RNA
aattgaggcattgagtggaggcaaa

SEQ ID NO: 3196 - RNA, 25 nt, Homo sapiens
  source 1..25: mol_type = unassigned RNA
aaattgaggcattgagtggaggcaa

SEQ ID NO: 3197 - RNA, 25 nt, Homo sapiens
  source 1..25: mol_type = unassigned RNA
gaaaacaaattgaggcattgagtgg

SEQ ID NO: 3198 - RNA, 25 nt, Homo sapiens
  source 1..25: mol_type = unassigned RNA
gcagaaaacaaattgaggcattgag

SEQ ID NO: 3199 - RNA, 25 nt, Homo sapiens
  source 1..25: mol_type = unassigned RNA
tctcagtcatgcagaaaacaaattg

SEQ ID NO: 3200 - RNA, 25 nt, Homo sapiens
  source 1..25: mol_type = unassigned RNA
aagacctcacagactcaaaataaat

SEQ ID NO: 3201 - RNA, 25 nt, Homo sapiens
  source 1..25: mol_type = unassigned RNA
aaatcattaagcagcaagtttagtt

SEQ ID NO: 3202 - RNA, 25 nt, Homo sapiens
  source 1..25: mol_type = unassigned RNA
ttccaatgtatacttgtagttatag

SEQ ID NO: 3203 - RNA, 25 nt, Homo sapiens
  source 1..25: mol_type = unassigned RNA
taaaggtgacatcctatgcaaccaa

SEQ ID NO: 3204 - RNA, 25 nt, Homo sapiens
  source 1..25: mol_type = unassigned RNA
accagagtattaatgggttaaataa

SEQ ID NO: 3205 - RNA, 25 nt, Homo sapiens
  source 1..25: mol_type = unassigned RNA
agattaggtcaaccagagtattaat

SEQ ID NO: 3206 - RNA, 25 nt, Homo sapiens
  source 1..25: mol_type = unassigned RNA
aagattaggtcaaccagagtattaa

SEQ ID NO: 3207 - RNA, 25 nt, Homo sapiens
  source 1..25: mol_type = unassigned RNA
acacttgaggtctgagaataagatt

SEQ ID NO: 3208 - RNA, 25 nt, Homo sapiens
  source 1..25: mol_type = unassigned RNA
ccttgtctaactgcacagacacttg

SEQ ID NO: 3209 - RNA, 25 nt, Homo sapiens
  source 1..25: mol_type = unassigned RNA
atatagctgtaaattgtattataaa

SEQ ID NO: 3210 - RNA, 25 nt, Homo sapiens
  source 1..25: mol_type = unassigned RNA
accacattggcctatttcctcctct

SEQ ID NO: 3211 - RNA, 25 nt, Homo sapiens
  source 1..25: mol_type = unassigned RNA
tatatccaaccgtcccagaccacat

SEQ ID NO: 3212 - RNA, 25 nt, Homo sapiens
  source 1..25: mol_type = unassigned RNA
aaaggaattccagtgttatttttca

SEQ ID NO: 3213 - RNA, 25 nt, Homo sapiens
  source 1..25: mol_type = unassigned RNA
aaaaggaattccagtgttatttttc

SEQ ID NO: 3214 - RNA, 25 nt, Homo sapiens
  source 1..25: mol_type = unassigned RNA
tcaggaataaatataatgctagaaa

SEQ ID NO: 3215 - RNA, 25 nt, Homo sapiens
  source 1..25: mol_type = unassigned RNA
ttagattatatggcaaaggcaaatc

SEQ ID NO: 3216 - RNA, 25 nt, Homo sapiens
  source 1..25: mol_type = unassigned RNA
aaacaagcattagattatatggcaa

SEQ ID NO: 3217 - RNA, 25 nt, Homo sapiens
  source 1..25: mol_type = unassigned RNA
ctatataaacaagcattagattata

SEQ ID NO: 3218 - RNA, 25 nt, Homo sapiens
  source 1..25: mol_type = unassigned RNA
cctttccatacttaaatttttttag

SEQ ID NO: 3219 - RNA, 25 nt, Homo sapiens
  source 1..25: mol_type = unassigned RNA
aaagaaggcatggatcctcagccct

SEQ ID NO: 3220 - RNA, 25 nt, Homo sapiens
  source 1..25: mol_type = unassigned RNA
caaagaaggcatggatcctcagccc

SEQ ID NO: 3221 - RNA, 25 nt, Homo sapiens
  source 1..25: mol_type = unassigned RNA
agataacttagaaacaaagaaggca

SEQ ID NO: 3222 - RNA, 25 nt, Homo sapiens
  source 1..25: mol_type = unassigned RNA
gggaaagataacttagaaacaaaga

SEQ ID NO: 3223 - RNA, 25 nt, Homo sapiens
  source 1..25: mol_type = unassigned RNA
catatgaaagataatgaaaagctat

SEQ ID NO: 3224 - RNA, 25 nt, Homo sapiens
  source 1..25: mol_type = unassigned RNA
tcatatgaaagataatgaaaagcta

SEQ ID NO: 3225 - RNA, 25 nt, Homo sapiens
  source 1..25: mol_type = unassigned RNA
tatgtaggacatatttaacatatac

SEQ ID NO: 3226 - RNA, 25 nt, Homo sapiens
  source 1..25: mol_type = unassigned RNA
atggtggttgtctaaatgtatatgt

SEQ ID NO: 3227 - RNA, 25 nt, Homo sapiens
  source 1..25: mol_type = unassigned RNA
cctagagcaaatacttaacaaatgg

SEQ ID NO: 3228 - RNA, 25 nt, Homo sapiens
  source 1..25: mol_type = unassigned RNA
tgtcctagagcaaatacttaacaaa

SEQ ID NO: 3229 - RNA, 25 nt, Homo sapiens
  source 1..25: mol_type = unassigned RNA
actcagtgcaccctggagagcccat

SEQ ID NO: 3230 - RNA, 25 nt, Homo sapiens
  source 1..25: mol_type = unassigned RNA
gactcagtgcaccctggagagccca

SEQ ID NO: 3231 - RNA, 25 nt, Homo sapiens
  source 1..25: mol_type = unassigned RNA
aggactagattgactcagtgcaccc

SEQ ID NO: 3232 - RNA, 25 nt, Homo sapiens
  source 1..25: mol_type = unassigned RNA
agagttaataataagattgcttttt

SEQ ID NO: 3233 - RNA, 25 nt, Homo sapiens
  source 1..25: mol_type = unassigned RNA
gtagctagcagtcaaggtacactgc

SEQ ID NO: 3234 - RNA, 25 nt, Homo sapiens
  source 1..25: mol_type = unassigned RNA
tctggcacagggtagctagcagtca

SEQ ID NO: 3235 - RNA, 25 nt, Homo sapiens
  source 1..25: mol_type = unassigned RNA
caacgaatgaggcttttctggcaca

SEQ ID NO: 3236 - RNA, 25 nt, Homo sapiens
  source 1..25: mol_type = unassigned RNA
acaacgaatgaggcttttctggcac

SEQ ID NO: 3237 - RNA, 25 nt, Homo sapiens
  source 1..25: mol_type = unassigned RNA
tcaagcacaacgaatgaggcttttc

SEQ ID NO: 3238 - RNA, 25 nt, Homo sapiens
  source 1..25: mol_type = unassigned RNA
ttcaagggttcaagcacaacgaatg

SEQ ID NO: 3239 - RNA, 25 nt, Homo sapiens
  source 1..25: mol_type = unassigned RNA
agtgatgacagctggtggcattcaa

SEQ ID NO: 3240 - RNA, 25 nt, Homo sapiens
  source 1..25: mol_type = unassigned RNA
tagtgatgacagctggtggcattca

SEQ ID NO: 3241 - RNA, 25 nt, Homo sapiens
  source 1..25: mol_type = unassigned RNA
agggctgtgtagtgatgacagctgg

SEQ ID NO: 3242 - RNA, 25 nt, Homo sapiens
  source 1..25: mol_type = unassigned RNA
aggagggctgtgtagtgatgacagc

SEQ ID NO: 3243 - RNA, 25 nt, Homo sapiens
  source 1..25: mol_type = unassigned RNA
gaaacctccaggaagcctcttagga

SEQ ID NO: 3244 - RNA, 25 nt, Homo sapiens
  source 1..25: mol_type = unassigned RNA
cgaaacctccaggaagcctcttagg

SEQ ID NO: 3245 - RNA, 25 nt, Homo sapiens
  source 1..25: mol_type = unassigned RNA
tctcgaaacctccaggaagcctctt

SEQ ID NO: 3246 - RNA, 25 nt, Homo sapiens
  source 1..25: mol_type = unassigned RNA
agggcatctgaatctcgaaacctcc

SEQ ID NO: 3247 - RNA, 25 nt, Homo sapiens
  source 1..25: mol_type = unassigned RNA
ggaaaggaaactctgggatctccca

SEQ ID NO: 3248 - RNA, 25 nt, Homo sapiens
  source 1..25: mol_type = unassigned RNA
gggaaaggaaactctgggatctccc

SEQ ID NO: 3249 - RNA, 25 nt, Homo sapiens
  source 1..25: mol_type = unassigned RNA
atggccaagagggaaaggaaactct

SEQ ID NO: 3250 - RNA, 25 nt, Homo sapiens
  source 1..25: mol_type = unassigned RNA
tatggccaagagggaaaggaaactc

SEQ ID NO: 3251 - RNA, 25 nt, Homo sapiens
  source 1..25: mol_type = unassigned RNA
acaccagaatatggccaagagggaa

SEQ ID NO: 3252 - RNA, 25 nt, Homo sapiens
  source 1..25: mol_type = unassigned RNA
cattgacaccagaatatggccaaga

SEQ ID NO: 3253 - RNA, 25 nt, Homo sapiens
  source 1..25: mol_type = unassigned RNA
tcattgacaccagaatatggccaag

SEQ ID NO: 3254 - RNA, 25 nt, Homo sapiens
  source 1..25: mol_type = unassigned RNA
actccttgtcattgacaccagaata

SEQ ID NO: 3255 - RNA, 25 nt, Homo sapiens
  source 1..25: mol_type = unassigned RNA
tcagccttgacatgtggcaaagcca

SEQ ID NO: 3256 - RNA, 25 nt, Homo sapiens
  source 1..25: mol_type = unassigned RNA
acactgtttcttcagccttgacatg

SEQ ID NO: 3257 - RNA, 25 nt, Homo sapiens
  source 1..25: mol_type = unassigned RNA
aaacagataacacaaggagctctgt

SEQ ID NO: 3258 - RNA, 25 nt, Homo sapiens
  source 1..25: mol_type = unassigned RNA
tgcacatgtacaaacagataacaca

SEQ ID NO: 3259 - RNA, 25 nt, Homo sapiens
  source 1..25: mol_type = unassigned RNA
acaccacaaggaggagttaggactt

SEQ ID NO: 3260 - RNA, 25 nt, Homo sapiens
  source 1..25: mol_type = unassigned RNA
aaatccaacaccacaaggaggagtt

SEQ ID NO: 3261 - RNA, 25 nt, Homo sapiens
  source 1..25: mol_type = unassigned RNA
gccttacaaatccaacaccacaagg

SEQ ID NO: 3262 - RNA, 25 nt, Homo sapiens
  source 1..25: mol_type = unassigned RNA
agtgccttacaaatccaacaccaca

SEQ ID NO: 3263 - RNA, 25 nt, Homo sapiens
  source 1..25: mol_type = unassigned RNA
atttacgatgaaacatgagacaaaa

SEQ ID NO: 3264 - RNA, 25 nt, Homo sapiens
  source 1..25: mol_type = unassigned RNA
catttacgatgaaacatgagacaaa

SEQ ID NO: 3265 - RNA, 25 nt, Homo sapiens
  source 1..25: mol_type = unassigned RNA
aaaagtgacaatcaaatgcagaatt

SEQ ID NO: 3266 - RNA, 25 nt, Homo sapiens
  source 1..25: mol_type = unassigned RNA
taagaatattttattaaattaatgc

SEQ ID NO: 3267 - RNA, 25 nt, Homo sapiens
  source 1..25: mol_type = unassigned RNA
aaaataaacaagaaaatggacatgc

SEQ ID NO: 3268 - RNA, 25 nt, Homo sapiens
  source 1..25: mol_type = unassigned RNA
attaaacacaaaataaacaagaaaa

SEQ ID NO: 3269 - RNA, 25 nt, Homo sapiens
  source 1..25: mol_type = unassigned RNA
aatattccaagtaactttctccact

SEQ ID NO: 3270 - RNA, 25 nt, Homo sapiens
  source 1..25: mol_type = unassigned RNA
aaatattccaagtaactttctccac

SEQ ID NO: 3271 - RNA, 25 nt, Homo sapiens
  source 1..25: mol_type = unassigned RNA
tataccgtcttgaaatttaagttta

SEQ ID NO: 3272 - RNA, 25 nt, Homo sapiens
  source 1..25: mol_type = unassigned RNA
aagtttagggaccactctctgtcaa

SEQ ID NO: 3273 - RNA, 25 nt, Homo sapiens
  source 1..25: mol_type = unassigned RNA
cactctctgtcaaaggatccagcgc

SEQ ID NO: 3274 - RNA, 25 nt, Homo sapiens
  source 1..25: mol_type = unassigned RNA
cagcgctggtaatatagattgctga

SEQ ID NO: 3275 - RNA, 25 nt, Homo sapiens
  source 1..25: mol_type = unassigned RNA
tgaaggcctttgccttctttccacc

SEQ ID NO: 3276 - RNA, 25 nt, Homo sapiens
  source 1..25: mol_type = unassigned RNA
ttctgtgaaaaatatagcttcagtt

SEQ ID NO: 3277 - RNA, 25 nt, Homo sapiens
  source 1..25: mol_type = unassigned RNA
cagtttggtccacgaatacagaagt

SEQ ID NO: 3278 - RNA, 25 nt, Homo sapiens
  source 1..25: mol_type = unassigned RNA
tttcaagcacacaacaagcaaaact

SEQ ID NO: 3279 - RNA, 25 nt, Homo sapiens
  source 1..25: mol_type = unassigned RNA
caatcaaatgcacttcgtttttccc

SEQ ID NO: 3280 - RNA, 25 nt, Homo sapiens
  source 1..25: mol_type = unassigned RNA
aatcaaatgcacttcgtttttccct

SEQ ID NO: 3281 - RNA, 25 nt, Homo sapiens
  source 1..25: mol_type = unassigned RNA
agctcctgccacatctcagccctgc

SEQ ID NO: 3282 - RNA, 25 nt, Homo sapiens
  source 1..25: mol_type = unassigned RNA
gctcctgccacatctcagccctgca

SEQ ID NO: 3283 - RNA, 25 nt, Homo sapiens
  source 1..25: mol_type = unassigned RNA
tcagccctgcagggcagtcttcata

SEQ ID NO: 3284 - RNA, 25 nt, Homo sapiens
  source 1..25: mol_type = unassigned RNA
cagccctgcagggcagtcttcataa

SEQ ID NO: 3285 - RNA, 25 nt, Homo sapiens
  source 1..25: mol_type = unassigned RNA
cagtcttcataagggagacaaaaga

SEQ ID NO: 3286 - RNA, 25 nt, Homo sapiens
  source 1..25: mol_type = unassigned RNA
agtcttcataagggagacaaaagaa

SEQ ID NO: 3287 - RNA, 25 nt, Homo sapiens
  source 1..25: mol_type = unassigned RNA
gggagacaaaagaagggctatgcac

SEQ ID NO: 3288 - RNA, 25 nt, Homo sapiens
  source 1..25: mol_type = unassigned RNA
agggctatgcactggcactgacagt

SEQ ID NO: 3289 - RNA, 25 nt, Homo sapiens
  source 1..25: mol_type = unassigned RNA
gggctatgcactggcactgacagtt

SEQ ID NO: 3290 - RNA, 25 nt, Homo sapiens
  source 1..25: mol_type = unassigned RNA
tatgcactggcactgacagttgggc

SEQ ID NO: 3291 - RNA, 25 nt, Homo sapiens
  source 1..25: mol_type = unassigned RNA
aataagcctaaatctcaacattcca

SEQ ID NO: 3292 - RNA, 25 nt, Homo sapiens
  source 1..25: mol_type = unassigned RNA
ataagcctaaatctcaacattccaa

SEQ ID NO: 3293 - RNA, 25 nt, Homo sapiens
  source 1..25: mol_type = unassigned RNA
cattccaagggaatcttcaagatca

SEQ ID NO: 3294 - RNA, 25 nt, Homo sapiens
  source 1..25: mol_type = unassigned RNA
ggaatcttcaagatcaaggtagacc

SEQ ID NO: 3295 - RNA, 25 nt, Homo sapiens
  source 1..25: mol_type = unassigned RNA
ggtccagtcatctcttaatctttta

SEQ ID NO: 3296 - RNA, 25 nt, Homo sapiens
  source 1..25: mol_type = unassigned RNA
tccatctcaaaaacaaaaaacaaaa

SEQ ID NO: 3297 - RNA, 25 nt, Homo sapiens
  source 1..25: mol_type = unassigned RNA
ccatctcaaaaacaaaaaacaaaaa

SEQ ID NO: 3298 - RNA, 25 nt, Homo sapiens
  source 1..25: mol_type = unassigned RNA
gatcacagatctctttgaaaatcag

SEQ ID NO: 3299 - RNA, 25 nt, Homo sapiens
  source 1..25: mol_type = unassigned RNA
tttccctagtttatctgaagtttca

SEQ ID NO: 3300 - RNA, 25 nt, Homo sapiens
  source 1..25: mol_type = unassigned RNA
ggacatatgatgtgcccgaatttcc

SEQ ID NO: 3301 - RNA, 25 nt, Homo sapiens
  source 1..25: mol_type = unassigned RNA
tctaacatccatgattaacagtctc

SEQ ID NO: 3302 - RNA, 25 nt, Homo sapiens
  source 1..25: mol_type = unassigned RNA
ctaacatccatgattaacagtctct

SEQ ID NO: 3303 - RNA, 25 nt, Homo sapiens
  source 1..25: mol_type = unassigned RNA
catccatgattaacagtctctgggt

SEQ ID NO: 3304 - RNA, 25 nt, Homo sapiens
  source 1..25: mol_type = unassigned RNA
atccatgattaacagtctctgggtt

SEQ ID NO: 3305 - RNA, 25 nt, Homo sapiens
  source 1..25: mol_type = unassigned RNA
cagtctctgggttgggtaactctgt

SEQ ID NO: 3306 - RNA, 25 nt, Homo sapiens
  source 1..25: mol_type = unassigned RNA
ggtaactctgttggcttaaatacag

SEQ ID NO: 3307 - RNA, 25 nt, Homo sapiens
  source 1..25: mol_type = unassigned RNA
tgacatgcctgtttaagttcagtgc

SEQ ID NO: 3308 - RNA, 25 nt, Homo sapiens
  source 1..25: mol_type = unassigned RNA
catgtgagtcattatcttctgaaaa

SEQ ID NO: 3309 - RNA, 25 nt, Homo sapiens
  source 1..25: mol_type = unassigned RNA
atgtgagtcattatcttctgaaaat

SEQ ID NO: 3310 - RNA, 25 nt, Homo sapiens
  source 1..25: mol_type = unassigned RNA
atgggaaaactctgctccatagcag

SEQ ID NO: 3311 - RNA, 25 nt, Homo sapiens
  source 1..25: mol_type = unassigned RNA
gtggacagaacctccaaaaccagtc

SEQ ID NO: 3312 - RNA, 25 nt, Homo sapiens
  source 1..25: mol_type = unassigned RNA
agacaaaacaccaagctcaaaaata

SEQ ID NO: 3313 - RNA, 25 nt, Homo sapiens
  source 1..25: mol_type = unassigned RNA
caaaacaccaagctcaaaaataagg

SEQ ID NO: 3314 - RNA, 25 nt, Homo sapiens
  source 1..25: mol_type = unassigned RNA
acaccaagctcaaaaataaggtggt

SEQ ID NO: 3315 - RNA, 25 nt, Homo sapiens
  source 1..25: mol_type = unassigned RNA
ctcaaaaataaggtggttggatcta

SEQ ID NO: 3316 - RNA, 25 nt, Homo sapiens
  source 1..25: mol_type = unassigned RNA
atggcattgcaaagcgacaacccaa

SEQ ID NO: 3317 - RNA, 25 nt, Homo sapiens
  source 1..25: mol_type = unassigned RNA
gcaaagcgacaacccaaaggttgtg

SEQ ID NO: 3318 - RNA, 25 nt, Homo sapiens
  source 1..25: mol_type = unassigned RNA
caaagcgacaacccaaaggttgtga

SEQ ID NO: 3319 - RNA, 25 nt, Homo sapiens
  source 1..25: mol_type = unassigned RNA
ctgctgacatagcaataatactcat

SEQ ID NO: 3320 - RNA, 25 nt, Homo sapiens
  source 1..25: mol_type = unassigned RNA
tgctgacatagcaataatactcatt

SEQ ID NO: 3321 - RNA, 25 nt, Homo sapiens
  source 1..25: mol_type = unassigned RNA
tccacttcatatacgttctcttcaa

SEQ ID NO: 3322 - RNA, 25 nt, Homo sapiens
  source 1..25: mol_type = unassigned RNA
tctgctactgcatttgccaatcctg

SEQ ID NO: 3323 - RNA, 25 nt, Homo sapiens
  source 1..25: mol_type = unassigned RNA
ctgctactgcatttgccaatcctga

SEQ ID NO: 3324 - RNA, 25 nt, Homo sapiens
  source 1..25: mol_type = unassigned RNA
ctactgcatttgccaatcctgaggg

SEQ ID NO: 3325 - RNA, 25 nt, Homo sapiens
  source 1..25: mol_type = unassigned RNA
tactgcatttgccaatcctgaggga

SEQ ID NO: 3326 - RNA, 25 nt, Homo sapiens
  source 1..25: mol_type = unassigned RNA
tgcatttgccaatcctgagggaggg

SEQ ID NO: 3327 - RNA, 25 nt, Homo sapiens
  source 1..25: mol_type = unassigned RNA
tttgccaatcctgagggagggaggt

SEQ ID NO: 3328 - RNA, 25 nt, Homo sapiens
  source 1..25: mol_type = unassigned RNA
gggagggaggttggccaaagagatg

SEQ ID NO: 3329 - RNA, 25 nt, Homo sapiens
  source 1..25: mol_type = unassigned RNA
gaggttggccaaagagatgaggctg

SEQ ID NO: 3330 - RNA, 25 nt, Homo sapiens
  source 1..25: mol_type = unassigned RNA
atgaggctgtggaaataaagtgttg

SEQ ID NO: 3331 - RNA, 25 nt, Homo sapiens
  source 1..25: mol_type = unassigned RNA
cagcgctggatcctttgacagagag

SEQ ID NO: 3332 - RNA, 25 nt, Homo sapiens
  source 1..25: mol_type = unassigned RNA
cttcagcaatctatattaccagcgc

SEQ ID NO: 3333 - RNA, 25 nt, Homo sapiens
  source 1..25: mol_type = unassigned RNA
ctgttgcctggtggaaagaaggcaa

SEQ ID NO: 3334 - RNA, 25 nt, Homo sapiens
  source 1..25: mol_type = unassigned RNA
caaattctgttgcctggtggaaaga

SEQ ID NO: 3335 - RNA, 25 nt, Homo sapiens
  source 1..25: mol_type = unassigned RNA
cggggacacaaattctgttgcctgg

SEQ ID NO: 3336 - RNA, 25 nt, Homo sapiens
  source 1..25: mol_type = unassigned RNA
tgacggggacacaaattctgttgcc

SEQ ID NO: 3337 - RNA, 25 nt, Homo sapiens
  source 1..25: mol_type = unassigned RNA
tttcacagaagaagaagcagtgacg

SEQ ID NO: 3338 - RNA, 25 nt, Homo sapiens
  source 1..25: mol_type = unassigned RNA
ttttcacagaagaagaagcagtgac

SEQ ID NO: 3339 - RNA, 25 nt, Homo sapiens
  source 1..25: mol_type = unassigned RNA
tttttcacagaagaagaagcagtga

SEQ ID NO: 3340 - RNA, 25 nt, Homo sapiens
  source 1..25: mol_type = unassigned RNA
tatctctgaccaacttctgtattcg

SEQ ID NO: 3341 - RNA, 25 nt, Homo sapiens
  source 1..25: mol_type = unassigned RNA
cgaagtgcatttgattggtgtgtat

SEQ ID NO: 3342 - RNA, 25 nt, Homo sapiens
  source 1..25: mol_type = unassigned RNA
cagggaaaaacgaagtgcatttgat

SEQ ID NO: 3343 - RNA, 25 nt, Homo sapiens
  source 1..25: mol_type = unassigned RNA
ggctgagatgtggcaggagctccca

SEQ ID NO: 3344 - RNA, 25 nt, Homo sapiens
  source 1..25: mol_type = unassigned RNA
gggctgagatgtggcaggagctccc

SEQ ID NO: 3345 - RNA, 25 nt, Homo sapiens
  source 1..25: mol_type = unassigned RNA
ctgccctgcagggctgagatgtggc

SEQ ID NO: 3346 - RNA, 25 nt, Homo sapiens
  source 1..25: mol_type = unassigned RNA
aagactgccctgcagggctgagatg

SEQ ID NO: 3347 - RNA, 25 nt, Homo sapiens
  source 1..25: mol_type = unassigned RNA
tctcccttatgaagactgccctgca

SEQ ID NO: 3348 - RNA, 25 nt, Homo sapiens
  source 1..25: mol_type = unassigned RNA
gtctcccttatgaagactgccctgc

SEQ ID NO: 3349 - RNA, 25 nt, Homo sapiens
  source 1..25: mol_type = unassigned RNA
agattcccttggaatgttgagattt

SEQ ID NO: 3350 - RNA, 25 nt, Homo sapiens
  source 1..25: mol_type = unassigned RNA
tctaccttgatcttgaagattccct

SEQ ID NO: 3351 - RNA, 25 nt, Homo sapiens
  source 1..25: mol_type = unassigned RNA
taaaagattaagagatgactggacc

SEQ ID NO: 3352 - RNA, 25 nt, Homo sapiens
  source 1..25: mol_type = unassigned RNA
gatccttaaaagattaagagatgac

SEQ ID NO: 3353 - RNA, 25 nt, Homo sapiens
  source 1..25: mol_type = unassigned RNA
cttttttggcacagaaagtctaaag

SEQ ID NO: 3354 - RNA, 25 nt, Homo sapiens
  source 1..25: mol_type = unassigned RNA
acttttttggcacagaaagtctaaa

SEQ ID NO: 3355 - RNA, 25 nt, Homo sapiens
  source 1..25: mol_type = unassigned RNA
aacttttttggcacagaaagtctaa

SEQ ID NO: 3356 - RNA, 25 nt, Homo sapiens
  source 1..25: mol_type = unassigned RNA
tgctgaggtgaaagcataacttttt

SEQ ID NO: 3357 - RNA, 25 nt, Homo sapiens
  source 1..25: mol_type = unassigned RNA
ataaactagggaaaactgggtgctg

SEQ ID NO: 3358 - RNA, 25 nt, Homo sapiens
  source 1..25: mol_type = unassigned RNA
aacttcagataaactagggaaaact

SEQ ID NO: 3359 - RNA, 25 nt, Homo sapiens
  source 1..25: mol_type = unassigned RNA
aaacttcagataaactagggaaaac

SEQ ID NO: 3360 - RNA, 25 nt, Homo sapiens
  source 1..25: mol_type = unassigned RNA
tgtccatgaaacttcagataaacta

SEQ ID NO: 3361 - RNA, 25 nt, Homo sapiens
  source 1..25: mol_type = unassigned RNA
atgtccatgaaacttcagataaact

SEQ ID NO: 3362 - RNA, 25 nt, Homo sapiens
  source 1..25: mol_type = unassigned RNA
gggtctctggagctccaggaaattc

SEQ ID NO: 3363 - RNA, 25 nt, Homo sapiens
  source 1..25: mol_type = unassigned RNA
ggggtctctggagctccaggaaatt

SEQ ID NO: 3364 - RNA, 25 nt, Homo sapiens
  source 1..25: mol_type = unassigned RNA
cttgacgtggggtctctggagctcc

SEQ ID NO: 3365 - RNA, 25 nt, Homo sapiens
  source 1..25: mol_type = unassigned RNA
ctaggaattcttgacgtggggtctc

SEQ ID NO: 3366 - RNA, 25 nt, Homo sapiens
  source 1..25: mol_type = unassigned RNA
atatacactaggaattcttgacgtg

SEQ ID NO: 3367 - RNA, 25 nt, Homo sapiens
  source 1..25: mol_type = unassigned RNA
tatatacactaggaattcttgacgt

SEQ ID NO: 3368 - RNA, 25 nt, Homo sapiens
  source 1..25: mol_type = unassigned RNA
ttatatacactaggaattcttgacg

SEQ ID NO: 3369 - RNA, 25 nt, Homo sapiens
  source 1..25: mol_type = unassigned RNA
gctcaaacgggcttttatatacact

SEQ ID NO: 3370 - RNA, 25 nt, Homo sapiens
  source 1..25: mol_type = unassigned RNA
taatcatggatgttagagctcaaac

SEQ ID NO: 3371 - RNA, 25 nt, Homo sapiens
  source 1..25: mol_type = unassigned RNA
ttaatcatggatgttagagctcaaa

SEQ ID NO: 3372 - RNA, 25 nt, Homo sapiens
  source 1..25: mol_type = unassigned RNA
tacccaacccagagactgttaatca

SEQ ID NO: 3373 - RNA, 25 nt, Homo sapiens
  source 1..25: mol_type = unassigned RNA
actgggacctgcactgaacttaaac

SEQ ID NO: 3374 - RNA, 25 nt, Homo sapiens
  source 1..25: mol_type = unassigned RNA
taatgactcacatgggaattgaact

SEQ ID NO: 3375 - RNA, 25 nt, Homo sapiens
  source 1..25: mol_type = unassigned RNA
ataatgactcacatgggaattgaac

SEQ ID NO: 3376 - RNA, 25 nt, Homo sapiens
  source 1..25: mol_type = unassigned RNA
attttcagaagataatgactcacat

SEQ ID NO: 3377 - RNA, 25 nt, Homo sapiens
  source 1..25: mol_type = unassigned RNA
cattttcagaagataatgactcaca

SEQ ID NO: 3378 - RNA, 25 nt, Homo sapiens
  source 1..25: mol_type = unassigned RNA
gttttggaggttctgtccactgcta

SEQ ID NO: 3379 - RNA, 25 nt, Homo sapiens
  source 1..25: mol_type = unassigned RNA
agctgtgtcacctgactggttttgg

SEQ ID NO: 3380 - RNA, 25 nt, Homo sapiens
  source 1..25: mol_type = unassigned RNA
atgagctgtgtcacctgactggttt

SEQ ID NO: 3381 - RNA, 25 nt, Homo sapiens
  source 1..25: mol_type = unassigned RNA
gaaactatgagctgtgtcacctgac

SEQ ID NO: 3382 - RNA, 25 nt, Homo sapiens
  source 1..25: mol_type = unassigned RNA
gatccaaccaccttatttttgagct

SEQ ID NO: 3383 - RNA, 25 nt, Homo sapiens
  source 1..25: mol_type = unassigned RNA
gcaggcagcaaccctcacaaccttt

SEQ ID NO: 3384 - RNA, 25 nt, Homo sapiens
  source 1..25: mol_type = unassigned RNA
agcaggcagcaaccctcacaacctt

SEQ ID NO: 3385 - RNA, 25 nt, Homo sapiens
  source 1..25: mol_type = unassigned RNA
tgagtattattgctatgtcagcagc

SEQ ID NO: 3386 - RNA, 25 nt, Homo sapiens
  source 1..25: mol_type = unassigned RNA
attgaagagaacgtatatgaagtgg

SEQ ID NO: 3387 - RNA, 25 nt, Homo sapiens
  source 1..25: mol_type = unassigned RNA
accattgaagagaacgtatatgaag

SEQ ID NO: 3388 - RNA, 25 nt, Homo sapiens
  source 1..25: mol_type = unassigned RNA
caggattggcaaatgcagtagcaga

SEQ ID NO: 3389 - RNA, 25 nt, Homo sapiens
  source 1..25: mol_type = unassigned RNA
tcaggattggcaaatgcagtagcag

SEQ ID NO: 3390 - RNA, 25 nt, Homo sapiens
  source 1..25: mol_type = unassigned RNA
ttggccaacctccctccctcaggat

SEQ ID NO: 3391 - RNA, 25 nt, Homo sapiens
  source 1..25: mol_type = unassigned RNA
tctctttggccaacctccctccctc

SEQ ID NO: 3392 - RNA, 25 nt, Homo sapiens
  source 1..25: mol_type = unassigned RNA
ctttatttccacagcctcatctctt

SEQ ID NO: 3393 - RNA, 25 nt, Homo sapiens
  source 1..25: mol_type = unassigned RNA
tctttgctatgagaataccctagta

SEQ ID NO: 3394 - RNA, 25 nt, Homo sapiens
  source 1..25: mol_type = unassigned RNA
ctttgctatgagaataccctagtaa

SEQ ID NO: 3395 - RNA, 25 nt, Homo sapiens
  source 1..25: mol_type = unassigned RNA
tttgctatgagaataccctagtaag

SEQ ID NO: 3396 - RNA, 25 nt, Homo sapiens
  source 1..25: mol_type = unassigned RNA
ttgctatgagaataccctagtaagg

SEQ ID NO: 3397 - RNA, 25 nt, Homo sapiens
  source 1..25: mol_type = unassigned RNA
aaggtaagaataatggaatggggtt

SEQ ID NO: 3398 - RNA, 25 nt, Homo sapiens
  source 1..25: mol_type = unassigned RNA
taaggtaagaataatggaatggggt

SEQ ID NO: 3399 - RNA, 25 nt, Homo sapiens
  source 1..25: mol_type = unassigned RNA
aatttaaggtaagaataatggaatg

SEQ ID NO: 3400 - RNA, 25 nt, Homo sapiens
  source 1..25: mol_type = unassigned RNA
gaatttaaggtaagaataatggaat

SEQ ID NO: 3401 - RNA, 25 nt, Homo sapiens
  source 1..25: mol_type = unassigned RNA
agaatttaaggtaagaataatggaa

SEQ ID NO: 3402 - RNA, 25 nt, Homo sapiens
  source 1..25: mol_type = unassigned RNA
gatacagaatttaaggtaagaataa

SEQ ID NO: 3403 - RNA, 25 nt, Homo sapiens
  source 1..25: mol_type = unassigned RNA
tagcaaagagaagatacagaattta

SEQ ID NO: 3404 - RNA, 25 nt, Homo sapiens
  source 1..25: mol_type = unassigned RNA
gctccgatgtagatgcctattctga

SEQ ID NO: 3405 - RNA, 25 nt, Homo sapiens
  source 1..25: mol_type = unassigned RNA
gttgctccagagtcccgtaagtcat

SEQ ID NO: 3406 - RNA, 25 nt, Homo sapiens
  source 1..25: mol_type = unassigned RNA
gccaatctagagtcccgtaactcat

SEQ ID NO: 3407 - RNA, 25 nt, Homo sapiens
  source 1..25: mol_type = unassigned RNA
gagtcccgtaactcattggccaatg

SEQ ID NO: 3408 - RNA, 25 nt, Homo sapiens
  source 1..25: mol_type = unassigned RNA
cattggccaatgtggatatttgcta

SEQ ID NO: 3409 - RNA, 25 nt, Homo sapiens
  source 1..25: mol_type = unassigned RNA
ggatatttgctatggaaacacaaac

SEQ ID NO: 3410 - RNA, 25 nt, Homo sapiens
  source 1..25: mol_type = unassigned RNA
ctgggctggctctggctcttatctt

SEQ ID NO: 3411 - RNA, 25 nt, Homo sapiens
  source 1..25: mol_type = unassigned RNA
gcagggatctgtgctgggctggctc

SEQ ID NO: 3412 - RNA, 25 nt, Homo sapiens
  source 1..25: mol_type = unassigned RNA
atcggagcagggatctgtgctgggc

SEQ ID NO: 3413 - RNA, 25 nt, Homo sapiens
  source 1..25: mol_type = unassigned RNA
ctacatcggagcagggatctgtgct

SEQ ID NO: 3414 - RNA, 25 nt, Homo sapiens
  source 1..25: mol_type = unassigned RNA
tctacatcggagcagggatctgtgc

SEQ ID NO: 3415 - RNA, 25 nt, Homo sapiens
  source 1..25: mol_type = unassigned RNA
cagaataggcatctacatcggagca

SEQ ID NO: 3416 - RNA, 25 nt, Homo sapiens
  source 1..25: mol_type = unassigned RNA
tcagaataggcatctacatcggagc

SEQ ID NO: 3417 - RNA, 25 nt, Homo sapiens
  source 1..25: mol_type = unassigned RNA
caaccatcagaataggcatctacat

SEQ ID NO: 3418 - RNA, 25 nt, Homo sapiens
  source 1..25: mol_type = unassigned RNA
gggactctggagcaaccatcagaat

SEQ ID NO: 3419 - RNA, 25 nt, Homo sapiens
  source 1..25: mol_type = unassigned RNA
gattggccaatgacttacgggactc

SEQ ID NO: 3420 - RNA, 25 nt, Homo sapiens
  source 1..25: mol_type = unassigned RNA
gactctagattggccaatgacttac

SEQ ID NO: 3421 - RNA, 25 nt, Homo sapiens
  source 1..25: mol_type = unassigned RNA
ggactctagattggccaatgactta

SEQ ID NO: 3422 - RNA, 25 nt, Homo sapiens
  source 1..25: mol_type = unassigned RNA
gccaatgagttacgggactctagat

SEQ ID NO: 3423 - RNA, 25 nt, Homo sapiens
  source 1..25: mol_type = unassigned RNA
atatccacattggccaatgagttac

SEQ ID NO: 3424 - RNA, 25 nt, Homo sapiens
  source 1..25: mol_type = unassigned RNA
aatatccacattggccaatgagtta

SEQ ID NO: 3425 - RNA, 25 nt, Homo sapiens
  source 1..25: mol_type = unassigned RNA
gtgtttccatagcaaatatccacat

SEQ ID NO: 3426 - RNA, 25 nt, Homo sapiens
  source 1..25: mol_type = unassigned RNA
agttacttactgttagatttatatc

SEQ ID NO: 3427 - RNA, 25 nt, Homo sapiens
  source 1..25: mol_type = unassigned RNA
gttacttactgttagatttatatca

SEQ ID NO: 3428 - RNA, 25 nt, Homo sapiens
  source 1..25: mol_type = unassigned RNA
acttactgttagatttatatcaggg

SEQ ID NO: 3429 - RNA, 25 nt, Homo sapiens
  source 1..25: mol_type = unassigned RNA
ttttatagcagagacacagacactg

SEQ ID NO: 3430 - RNA, 25 nt, Homo sapiens
  source 1..25: mol_type = unassigned RNA
attttatagcagagacacagacact

SEQ ID NO: 3431 - RNA, 25 nt, Homo sapiens
  source 1..25: mol_type = unassigned RNA
gattttatagcagagacacagacac

SEQ ID NO: 3432 - RNA, 25 nt, Homo sapiens
  source 1..25: mol_type = unassigned RNA
ctcctctgccccatgcatagttacc

SEQ ID NO: 3433 - RNA, 25 nt, Homo sapiens
  source 1..25: mol_type = unassigned RNA
tcctctgccccatgcatagttacct

SEQ ID NO: 3434 - RNA, 25 nt, Homo sapiens
  source 1..25: mol_type = unassigned RNA
gcatagttacctgggccatgtcccc

SEQ ID NO: 3435 - RNA, 25 nt, Homo sapiens
  source 1..25: mol_type = unassigned RNA
tagttacctgggccatgtcccctgg

SEQ ID NO: 3436 - RNA, 25 nt, Homo sapiens
  source 1..25: mol_type = unassigned RNA
catgtcccctggtggtaagcatcct

SEQ ID NO: 3437 - RNA, 25 nt, Homo sapiens
  source 1..25: mol_type = unassigned RNA
cccctggtggtaagcatccttggaa

SEQ ID NO: 3438 - RNA, 25 nt, Homo sapiens
  source 1..25: mol_type = unassigned RNA
ctgcagtgaagtctctctgccgagt

SEQ ID NO: 3439 - RNA, 25 nt, Homo sapiens
  source 1..25: mol_type = unassigned RNA
tgaagtctctctgccgagtcggtgc

SEQ ID NO: 3440 - RNA, 25 nt, Homo sapiens
  source 1..25: mol_type = unassigned RNA
gaagtctctctgccgagtcggtgca

SEQ ID NO: 3441 - RNA, 25 nt, Homo sapiens
  source 1..25: mol_type = unassigned RNA
aagtctctctgccgagtcggtgcag

SEQ ID NO: 3442 - RNA, 25 nt, Homo sapiens
  source 1..25: mol_type = unassigned RNA
tgccgagtcggtgcaggggtgacct

SEQ ID NO: 3443 - RNA, 25 nt, Homo sapiens
  source 1..25: mol_type = unassigned RNA
cttggctaatgtcagaaacaacata

SEQ ID NO: 3444 - RNA, 25 nt, Homo sapiens
  source 1..25: mol_type = unassigned RNA
caggtaactatgcatggggcagagg

SEQ ID NO: 3445 - RNA, 25 nt, Homo sapiens
  source 1..25: mol_type = unassigned RNA
gcccaggtaactatgcatggggcag

SEQ ID NO: 3446 - RNA, 25 nt, Homo sapiens
  source 1..25: mol_type = unassigned RNA
gacatggcccaggtaactatgcatg

SEQ ID NO: 3447 - RNA, 25 nt, Homo sapiens
  source 1..25: mol_type = unassigned RNA
ggacatggcccaggtaactatgcat

SEQ ID NO: 3448 - RNA, 25 nt, Homo sapiens
  source 1..25: mol_type = unassigned RNA
gggacatggcccaggtaactatgca

SEQ ID NO: 3449 - RNA, 25 nt, Homo sapiens
  source 1..25: mol_type = unassigned RNA
tgcttaccaccaggggacatggccc

SEQ ID NO: 3450 - RNA, 25 nt, Homo sapiens
  source 1..25: mol_type = unassigned RNA
caaggatgcttaccaccaggggaca

SEQ ID NO: 3451 - RNA, 25 nt, Homo sapiens
  source 1..25: mol_type = unassigned RNA
cctttccaaggatgcttaccaccag

SEQ ID NO: 3452 - RNA, 25 nt, Homo sapiens
  source 1..25: mol_type = unassigned RNA
gcctttccaaggatgcttaccacca

SEQ ID NO: 3453 - RNA, 25 nt, Homo sapiens
  source 1..25: mol_type = unassigned RNA
agcctttccaaggatgcttaccacc

SEQ ID NO: 3454 - RNA, 25 nt, Homo sapiens
  source 1..25: mol_type = unassigned RNA
gagagacttcactgcagcctttcca

SEQ ID NO: 3455 - RNA, 25 nt, Homo sapiens
  source 1..25: mol_type = unassigned RNA
agccaaggtcacccctgcaccgact

SEQ ID NO: 3456 - RNA, 25 nt, Homo sapiens
  source 1..25: mol_type = unassigned RNA
cttatgttgtttctgacattagcca

SEQ ID NO: 3457 - RNA, 25 nt, Homo sapiens
  source 1..25: mol_type = unassigned RNA
gatggcatgcaaatgtccactcacc

SEQ ID NO: 3458 - RNA, 25 nt, Homo sapiens
  source 1..25: mol_type = unassigned RNA
ctcacctggtttgatgaccaacttc

SEQ ID NO: 3459 - RNA, 25 nt, Homo sapiens
  source 1..25: mol_type = unassigned RNA
taaatttttcatcattcattatgcc

SEQ ID NO: 3460 - RNA, 25 nt, Homo sapiens
  source 1..25: mol_type = unassigned RNA
aaatttttcatcattcattatgcct

SEQ ID NO: 3461 - RNA, 25 nt, Homo sapiens
  source 1..25: mol_type = unassigned RNA
ttcatcattcattatgcctgggatt

SEQ ID NO: 3462 - RNA, 25 nt, Homo sapiens
  source 1..25: mol_type = unassigned RNA
attcattatgcctgggatttggatc

SEQ ID NO: 3463 - RNA, 25 nt, Homo sapiens
  source 1..25: mol_type = unassigned RNA
ctgtctgctagagtcacattctcta

SEQ ID NO: 3464 - RNA, 25 nt, Homo sapiens
  source 1..25: mol_type = unassigned RNA
tgctagagtcacattctctatggtc

SEQ ID NO: 3465 - RNA, 25 nt, Homo sapiens
  source 1..25: mol_type = unassigned RNA
gctagagtcacattctctatggtca

SEQ ID NO: 3466 - RNA, 25 nt, Homo sapiens
  source 1..25: mol_type = unassigned RNA
tatggtcagggacacatctcctttg

SEQ ID NO: 3467 - RNA, 25 nt, Homo sapiens
  source 1..25: mol_type = unassigned RNA
cggaaatccccatttagccagtatc

SEQ ID NO: 3468 - RNA, 25 nt, Homo sapiens
  source 1..25: mol_type = unassigned RNA
gcaccacgttgccacattcaaacac

SEQ ID NO: 3469 - RNA, 25 nt, Homo sapiens
  source 1..25: mol_type = unassigned RNA
acgttgccacattcaaacacaggac

SEQ ID NO: 3470 - RNA, 25 nt, Homo sapiens
  source 1..25: mol_type = unassigned RNA
ggacaggctcctttgccccagcaga

SEQ ID NO: 3471 - RNA, 25 nt, Homo sapiens
  source 1..25: mol_type = unassigned RNA
gacaggctcctttgccccagcagac

SEQ ID NO: 3472 - RNA, 25 nt, Homo sapiens
  source 1..25: mol_type = unassigned RNA
tcctttgccccagcagacgggcacg

SEQ ID NO: 3473 - RNA, 25 nt, Homo sapiens
  source 1..25: mol_type = unassigned RNA
cccagcagacgggcacgaggttccc

SEQ ID NO: 3474 - RNA, 25 nt, Homo sapiens
  source 1..25: mol_type = unassigned RNA
ccagcagacgggcacgaggttccct

SEQ ID NO: 3475 - RNA, 25 nt, Homo sapiens
  source 1..25: mol_type = unassigned RNA
cagcagacgggcacgaggttccctg

SEQ ID NO: 3476 - RNA, 25 nt, Homo sapiens
  source 1..25: mol_type = unassigned RNA
cagacgggcacgaggttccctgggg

SEQ ID NO: 3477 - RNA, 25 nt, Homo sapiens
  source 1..25: mol_type = unassigned RNA
cgggcacgaggttccctggggcggc

SEQ ID NO: 3478 - RNA, 25 nt, Homo sapiens
  source 1..25: mol_type = unassigned RNA
gggcacgaggttccctggggcggct

SEQ ID NO: 3479 - RNA, 25 nt, Homo sapiens
  source 1..25: mol_type = unassigned RNA
ggcacgaggttccctggggcggctg

SEQ ID NO: 3480 - RNA, 25 nt, Homo sapiens
  source 1..25: mol_type = unassigned RNA
cctggggcggctggggtgtagaagc

SEQ ID NO: 3481 - RNA, 25 nt, Homo sapiens
  source 1..25: mol_type = unassigned RNA
ctggggcggctggggtgtagaagca

SEQ ID NO: 3482 - RNA, 25 nt, Homo sapiens
  source 1..25: mol_type = unassigned RNA
gctggggtgtagaagcagggcagat

SEQ ID NO: 3483 - RNA, 25 nt, Homo sapiens
  source 1..25: mol_type = unassigned RNA
acctccgctctgtattccacttctg

SEQ ID NO: 3484 - RNA, 25 nt, Homo sapiens
  source 1..25: mol_type = unassigned RNA
tctgaggaccctgcatagagagaga

SEQ ID NO: 3485 - RNA, 25 nt, Homo sapiens
  source 1..25: mol_type = unassigned RNA
gaagttggtcatcaaaccaggtgag

SEQ ID NO: 3486 - RNA, 25 nt, Homo sapiens
  source 1..25: mol_type = unassigned RNA
ttaacctgaagttggtcatcaaacc

SEQ ID NO: 3487 - RNA, 25 nt, Homo sapiens
  source 1..25: mol_type = unassigned RNA
aatgatgaaaaatttaacctgaagt

SEQ ID NO: 3488 - RNA, 25 nt, Homo sapiens
  source 1..25: mol_type = unassigned RNA
tctactgctgccggatccaaatccc

SEQ ID NO: 3489 - RNA, 25 nt, Homo sapiens
  source 1..25: mol_type = unassigned RNA
agcagacagtgggatctactgctgc

SEQ ID NO: 3490 - RNA, 25 nt, Homo sapiens
  source 1..25: mol_type = unassigned RNA
agagaatgtgactctagcagacagt

SEQ ID NO: 3491 - RNA, 25 nt, Homo sapiens
  source 1..25: mol_type = unassigned RNA
tagagaatgtgactctagcagacag

SEQ ID NO: 3492 - RNA, 25 nt, Homo sapiens
  source 1..25: mol_type = unassigned RNA
actggctaaatggggatttccgcaa

SEQ ID NO: 3493 - RNA, 25 nt, Homo sapiens
  source 1..25: mol_type = unassigned RNA
tggacatccagatactggctaaatg

SEQ ID NO: 3494 - RNA, 25 nt, Homo sapiens
  source 1..25: mol_type = unassigned RNA
ttggacatccagatactggctaaat

SEQ ID NO: 3495 - RNA, 25 nt, Homo sapiens
  source 1..25: mol_type = unassigned RNA
attggacatccagatactggctaaa

SEQ ID NO: 3496 - RNA, 25 nt, Homo sapiens
  source 1..25: mol_type = unassigned RNA
tgtgaattattggacatccagatac

SEQ ID NO: 3497 - RNA, 25 nt, Homo sapiens
  source 1..25: mol_type = unassigned RNA
gactgatgaaagggatgtgaattat

SEQ ID NO: 3498 - RNA, 25 nt, Homo sapiens
  source 1..25: mol_type = unassigned RNA
aacgtggtgctcaggactgatgaaa

SEQ ID NO: 3499 - RNA, 25 nt, Homo sapiens
  source 1..25: mol_type = unassigned RNA
caacgtggtgctcaggactgatgaa

SEQ ID NO: 3500 - RNA, 25 nt, Homo sapiens
  source 1..25: mol_type = unassigned RNA
gtttgaatgtggcaacgtggtgctc

SEQ ID NO: 3501 - RNA, 25 nt, Homo sapiens
  source 1..25: mol_type = unassigned RNA
tgtcctgtgtttgaatgtggcaacg

SEQ ID NO: 3502 - RNA, 25 nt, Homo sapiens
  source 1..25: mol_type = unassigned RNA
aaggagcctgtcctgtgtttgaatg

SEQ ID NO: 3503 - RNA, 25 nt, Homo sapiens
  source 1..25: mol_type = unassigned RNA
acctcgtgcccgtctgctggggcaa

SEQ ID NO: 3504 - RNA, 25 nt, Homo sapiens
  source 1..25: mol_type = unassigned RNA
cagggaacctcgtgcccgtctgctg

SEQ ID NO: 3505 - RNA, 25 nt, Homo sapiens
  source 1..25: mol_type = unassigned RNA
ccagggaacctcgtgcccgtctgct

SEQ ID NO: 3506 - RNA, 25 nt, Homo sapiens
  source 1..25: mol_type = unassigned RNA
cccagggaacctcgtgcccgtctgc

SEQ ID NO: 3507 - RNA, 25 nt, Homo sapiens
  source 1..25: mol_type = unassigned RNA
ctgcttctacaccccagccgcccca

SEQ ID NO: 3508 - RNA, 25 nt, Homo sapiens
  source 1..25: mol_type = unassigned RNA
cctgcttctacaccccagccgcccc

SEQ ID NO: 3509 - RNA, 25 nt, Homo sapiens
  source 1..25: mol_type = unassigned RNA
cagaagtggaatacagagcggaggt

SEQ ID NO: 3510 - RNA, 25 nt, Homo sapiens
  source 1..25: mol_type = unassigned RNA
tcctcagaagtggaatacagagcgg

SEQ ID NO: 3511 - RNA, 25 nt, Homo sapiens
  source 1..25: mol_type = unassigned RNA
gggtcctcagaagtggaatacagag

SEQ ID NO: 3512 - RNA, 25 nt, Homo sapiens
  source 1..25: mol_type = unassigned RNA
tctctctatgcagggtcctcagaag

SEQ ID NO: 3513 - RNA, 25 nt, Homo sapiens
  source 1..25: mol_type = unassigned RNA
agcagcagcagcaggacacagtcaa

SEQ ID NO: 3514 - RNA, 25 nt, Homo sapiens
  source 1..25: mol_type = unassigned RNA
gcagcagcagcaggacacagtcaaa

SEQ ID NO: 3515 - RNA, 25 nt, Homo sapiens
  source 1..25: mol_type = unassigned RNA
cagtcaaagggaagatgtgaaaaca

SEQ ID NO: 3516 - RNA, 25 nt, Homo sapiens
  source 1..25: mol_type = unassigned RNA
atggagcttgcagaagaaaagtcag

SEQ ID NO: 3517 - RNA, 25 nt, Homo sapiens
  source 1..25: mol_type = unassigned RNA
agaaaagtcagaggacacctctgtt

SEQ ID NO: 3518 - RNA, 25 nt, Homo sapiens
  source 1..25: mol_type = unassigned RNA
ttaggcacagttttaactctccaaa

SEQ ID NO: 3519 - RNA, 25 nt, Homo sapiens
  source 1..25: mol_type = unassigned RNA
cacagttttaactctccaaatggac

SEQ ID NO: 3520 - RNA, 25 nt, Homo sapiens
  source 1..25: mol_type = unassigned RNA
acagttttaactctccaaatggact

SEQ ID NO: 3521 - RNA, 25 nt, Homo sapiens
  source 1..25: mol_type = unassigned RNA
ccactgagtgctagctcagcacacc

SEQ ID NO: 3522 - RNA, 25 nt, Homo sapiens
  source 1..25: mol_type = unassigned RNA
cactgagtgctagctcagcacaccc

SEQ ID NO: 3523 - RNA, 25 nt, Homo sapiens
  source 1..25: mol_type = unassigned RNA
cagtgattcttatagtaacactgcc

SEQ ID NO: 3524 - RNA, 25 nt, Homo sapiens
  source 1..25: mol_type = unassigned RNA
actgccaggtctacagtcacattaa

SEQ ID NO: 3525 - RNA, 25 nt, Homo sapiens
  source 1..25: mol_type = unassigned RNA
cgacgatgatgatacaagtaagtct

SEQ ID NO: 3526 - RNA, 25 nt, Homo sapiens
  source 1..25: mol_type = unassigned RNA
ggagagttaaaactgtgcctaacag

SEQ ID NO: 3527 - RNA, 25 nt, Homo sapiens
  source 1..25: mol_type = unassigned RNA
agttggaagaagtacccagtccatt

SEQ ID NO: 3528 - RNA, 25 nt, Homo sapiens
  source 1..25: mol_type = unassigned RNA
ctcatgtgattgtggagtagacagt

SEQ ID NO: 3529 - RNA, 25 nt, Homo sapiens
  source 1..25: mol_type = unassigned RNA
ggggcggctactgctcatgtgattg

SEQ ID NO: 3530 - RNA, 25 nt, Homo sapiens
  source 1..25: mol_type = unassigned RNA
gtgctgagctagcactcagtggggg

SEQ ID NO: 3531 - RNA, 25 nt, Homo sapiens
  source 1..25: mol_type = unassigned RNA
ggtgtgctgagctagcactcagtgg

SEQ ID NO: 3532 - RNA, 25 nt, Homo sapiens
  source 1..25: mol_type = unassigned RNA
gggtgtgctgagctagcactcagtg

SEQ ID NO: 3533 - RNA, 25 nt, Homo sapiens
  source 1..25: mol_type = unassigned RNA
cgggtgtgctgagctagcactcagt

SEQ ID NO: 3534 - RNA, 25 nt, Homo sapiens
  source 1..25: mol_type = unassigned RNA
ccgggtgtgctgagctagcactcag

SEQ ID NO: 3535 - RNA, 25 nt, Homo sapiens
  source 1..25: mol_type = unassigned RNA
aagaatcactggcaatcagacaccc

SEQ ID NO: 3536 - RNA, 25 nt, Homo sapiens
  source 1..25: mol_type = unassigned RNA
taagaatcactggcaatcagacacc

SEQ ID NO: 3537 - RNA, 25 nt, Homo sapiens
  source 1..25: mol_type = unassigned RNA
ctggcagtgttactataagaatcac

SEQ ID NO: 3538 - RNA, 25 nt, Homo sapiens
  source 1..25: mol_type = unassigned RNA
gtttcctttaatgtgactgtagacc

SEQ ID NO: 3539 - RNA, 25 nt, Homo sapiens
  source 1..25: mol_type = unassigned RNA
tgtagtgtggcatgacagagaactt

SEQ ID NO: 3540 - RNA, 25 nt, Homo sapiens
  source 1..25: mol_type = unassigned RNA
gaacacttacaggatgtgtgtagtg

SEQ ID NO: 3541 - RNA, 25 nt, Homo sapiens
  source 1..25: mol_type = unassigned RNA
acaggacagacatcagaacacttac

SEQ ID NO: 3542 - RNA, 25 nt, Homo sapiens
  source 1..25: mol_type = unassigned RNA
ggaaggtggagggaaggccgggcac

SEQ ID NO: 3543 - RNA, 25 nt, Homo sapiens
  source 1..25: mol_type = unassigned RNA
gaaggtggagggaaggccgggcaca

SEQ ID NO: 3544 - RNA, 25 nt, Homo sapiens
  source 1..25: mol_type = unassigned RNA
aaggtggagggaaggccgggcacag

SEQ ID NO: 3545 - RNA, 25 nt, Homo sapiens
  source 1..25: mol_type = unassigned RNA
gagggaaggccgggcacaggggtga

SEQ ID NO: 3546 - RNA, 25 nt, Homo sapiens
  source 1..25: mol_type = unassigned RNA
ggtgaaggcccagagaccagcagaa

SEQ ID NO: 3547 - RNA, 25 nt, Homo sapiens
  source 1..25: mol_type = unassigned RNA
cagcagaacggcatcccagccacga

SEQ ID NO: 3548 - RNA, 25 nt, Homo sapiens
  source 1..25: mol_type = unassigned RNA
actttgctctgtctgctctccgcca

SEQ ID NO: 3549 - RNA, 25 nt, Homo sapiens
  source 1..25: mol_type = unassigned RNA
tccgccacggccctgctctgttccc

SEQ ID NO: 3550 - RNA, 25 nt, Homo sapiens
  source 1..25: mol_type = unassigned RNA
ccgccacggccctgctctgttccct

SEQ ID NO: 3551 - RNA, 25 nt, Homo sapiens
  source 1..25: mol_type = unassigned RNA
gggacacccccgcccccacctcctc

SEQ ID NO: 3552 - RNA, 25 nt, Homo sapiens
  source 1..25: mol_type = unassigned RNA
tctgcccagctttccagctttcctc

SEQ ID NO: 3553 - RNA, 25 nt, Homo sapiens
  source 1..25: mol_type = unassigned RNA
agctttccagctttcctctggattc

SEQ ID NO: 3554 - RNA, 25 nt, Homo sapiens
  source 1..25: mol_type = unassigned RNA
cagctttcctctggattccggcctc

SEQ ID NO: 3555 - RNA, 25 nt, Homo sapiens
  source 1..25: mol_type = unassigned RNA
gtcatccctccccaccctctctcca

SEQ ID NO: 3556 - RNA, 25 nt, Homo sapiens
  source 1..25: mol_type = unassigned RNA
ccaccctctctccaaggccctctcc

SEQ ID NO: 3557 - RNA, 25 nt, Homo sapiens
  source 1..25: mol_type = unassigned RNA
cccctttccttttctgacctccttt

SEQ ID NO: 3558 - RNA, 25 nt, Homo sapiens
  source 1..25: mol_type = unassigned RNA
ctttccttttctgacctccttttgg

SEQ ID NO: 3559 - RNA, 25 nt, Homo sapiens
  source 1..25: mol_type = unassigned RNA
tttccttttctgacctccttttgga

SEQ ID NO: 3560 - RNA, 25 nt, Homo sapiens
  source 1..25: mol_type = unassigned RNA
gagggctcagcgctgcccagaccat

SEQ ID NO: 3561 - RNA, 25 nt, Homo sapiens
  source 1..25: mol_type = unassigned RNA
cgctgcccagaccataggagagatg

SEQ ID NO: 3562 - RNA, 25 nt, Homo sapiens
  source 1..25: mol_type = unassigned RNA
gctgcccagaccataggagagatgt

SEQ ID NO: 3563 - RNA, 25 nt, Homo sapiens
  source 1..25: mol_type = unassigned RNA
gcccagaccataggagagatgtggg

SEQ ID NO: 3564 - RNA, 25 nt, Homo sapiens
  source 1..25: mol_type = unassigned RNA
ggagagatgtgggaggctcagttcc

SEQ ID NO: 3565 - RNA, 25 nt, Homo sapiens
  source 1..25: mol_type = unassigned RNA
gagagatgtgggaggctcagttcct

SEQ ID NO: 3566 - RNA, 25 nt, Homo sapiens
  source 1..25: mol_type = unassigned RNA
gggcttgctgtttctgcagccgctt

SEQ ID NO: 3567 - RNA, 25 nt, Homo sapiens
  source 1..25: mol_type = unassigned RNA
ggcttgctgtttctgcagccgcttt

SEQ ID NO: 3568 - RNA, 25 nt, Homo sapiens
  source 1..25: mol_type = unassigned RNA
ttgctgtttctgcagccgctttggg

SEQ ID NO: 3569 - RNA, 25 nt, Homo sapiens
  source 1..25: mol_type = unassigned RNA
ttctgcagccgctttgggtggctcc

SEQ ID NO: 3570 - RNA, 25 nt, Homo sapiens
  source 1..25: mol_type = unassigned RNA
ccgctttgggtggctccaggtaaaa

SEQ ID NO: 3571 - RNA, 25 nt, Homo sapiens
  source 1..25: mol_type = unassigned RNA
cgctttgggtggctccaggtaaaac

SEQ ID NO: 3572 - RNA, 25 nt, Homo sapiens
  source 1..25: mol_type = unassigned RNA
gctttgggtggctccaggtaaaacg

SEQ ID NO: 3573 - RNA, 25 nt, Homo sapiens
  source 1..25: mol_type = unassigned RNA
tgggtggctccaggtaaaacgggga

SEQ ID NO: 3574 - RNA, 25 nt, Homo sapiens
  source 1..25: mol_type = unassigned RNA
gtggctccaggtaaaacggggatgg

SEQ ID NO: 3575 - RNA, 25 nt, Homo sapiens
  source 1..25: mol_type = unassigned RNA
tggctccaggtaaaacggggatggc

SEQ ID NO: 3576 - RNA, 25 nt, Homo sapiens
  source 1..25: mol_type = unassigned RNA
ctccaggtaaaacggggatggcggg

SEQ ID NO: 3577 - RNA, 25 nt, Homo sapiens
  source 1..25: mol_type = unassigned RNA
tccaggtaaaacggggatggcggga

SEQ ID NO: 3578 - RNA, 25 nt, Homo sapiens
  source 1..25: mol_type = unassigned RNA
gtctctgggccttcacccctgtgcc

SEQ ID NO: 3579 - RNA, 25 nt, Homo sapiens
  source 1..25: mol_type = unassigned RNA
ctgggatgccgttctgctggtctct

SEQ ID NO: 3580 - RNA, 25 nt, Homo sapiens
  source 1..25: mol_type = unassigned RNA
gctgggatgccgttctgctggtctc

SEQ ID NO: 3581 - RNA, 25 nt, Homo sapiens
  source 1..25: mol_type = unassigned RNA
cgtcgtggctgggatgccgttctgc

SEQ ID NO: 3582 - RNA, 25 nt, Homo sapiens
  source 1..25: mol_type = unassigned RNA
acagagcaaagtggccgtcgtggct

SEQ ID NO: 3583 - RNA, 25 nt, Homo sapiens
  source 1..25: mol_type = unassigned RNA
gacagagcaaagtggccgtcgtggc

SEQ ID NO: 3584 - RNA, 25 nt, Homo sapiens
  source 1..25: mol_type = unassigned RNA
agcagacagagcaaagtggccgtcg

SEQ ID NO: 3585 - RNA, 25 nt, Homo sapiens
  source 1..25: mol_type = unassigned RNA
gtggcggagagcagacagagcaaag

SEQ ID NO: 3586 - RNA, 25 nt, Homo sapiens
  source 1..25: mol_type = unassigned RNA
cccagggaacagagcagggccgtgg

SEQ ID NO: 3587 - RNA, 25 nt, Homo sapiens
  source 1..25: mol_type = unassigned RNA
tgtcccagggaacagagcagggccg

SEQ ID NO: 3588 - RNA, 25 nt, Homo sapiens
  source 1..25: mol_type = unassigned RNA
cgggggtgtcccagggaacagagca

SEQ ID NO: 3589 - RNA, 25 nt, Homo sapiens
  source 1..25: mol_type = unassigned RNA
gcgggggtgtcccagggaacagagc

SEQ ID NO: 3590 - RNA, 25 nt, Homo sapiens
  source 1..25: mol_type = unassigned RNA
aggaggtgggggcgggggtgtccca

SEQ ID NO: 3591 - RNA, 25 nt, Homo sapiens
  source 1..25: mol_type = unassigned RNA
gaggaggtgggggcgggggtgtccc

SEQ ID NO: 3592 - RNA, 25 nt, Homo sapiens
  source 1..25: mol_type = unassigned RNA
aggcagcctgaggaggtgggggcgg

SEQ ID NO: 3593 - RNA, 25 nt, Homo sapiens
  source 1..25: mol_type = unassigned RNA
caggcagcctgaggaggtgggggcg

SEQ ID NO: 3594 - RNA, 25 nt, Homo sapiens
  source 1..25: mol_type = unassigned RNA
tcaggcagcctgaggaggtgggggc

SEQ ID NO: 3595 - RNA, 25 nt, Homo sapiens
  source 1..25: mol_type = unassigned RNA
atcaggcagcctgaggaggtggggg

SEQ ID NO: 3596 - RNA, 25 nt, Homo sapiens
  source 1..25: mol_type = unassigned RNA
cagatcaggcagcctgaggaggtgg

SEQ ID NO: 3597 - RNA, 25 nt, Homo sapiens
  source 1..25: mol_type = unassigned RNA
gcagatcaggcagcctgaggaggtg

SEQ ID NO: 3598 - RNA, 25 nt, Homo sapiens
  source 1..25: mol_type = unassigned RNA
ggcagatcaggcagcctgaggaggt

SEQ ID NO: 3599 - RNA, 25 nt, Homo sapiens
  source 1..25: mol_type = unassigned RNA
gggcagatcaggcagcctgaggagg

SEQ ID NO: 3600 - RNA, 25 nt, Homo sapiens
  source 1..25: mol_type = unassigned RNA
gctgggcagatcaggcagcctgagg

SEQ ID NO: 3601 - RNA, 25 nt, Homo sapiens
  source 1..25: mol_type = unassigned RNA
aaagctgggcagatcaggcagcctg

SEQ ID NO: 3602 - RNA, 25 nt, Homo sapiens
  source 1..25: mol_type = unassigned RNA
ggaaagctggaaagctgggcagatc

SEQ ID NO: 3603 - RNA, 25 nt, Homo sapiens
  source 1..25: mol_type = unassigned RNA
gaatccagaggaaagctggaaagct

SEQ ID NO: 3604 - RNA, 25 nt, Homo sapiens
  source 1..25: mol_type = unassigned RNA
ggaatccagaggaaagctggaaagc

SEQ ID NO: 3605 - RNA, 25 nt, Homo sapiens
  source 1..25: mol_type = unassigned RNA
cagaggccggaatccagaggaaagc

SEQ ID NO: 3606 - RNA, 25 nt, Homo sapiens
  source 1..25: mol_type = unassigned RNA
gggatgaccagaggccggaatccag

SEQ ID NO: 3607 - RNA, 25 nt, Homo sapiens
  source 1..25: mol_type = unassigned RNA
agggtggggagggatgaccagaggc

SEQ ID NO: 3608 - RNA, 25 nt, Homo sapiens
  source 1..25: mol_type = unassigned RNA
agagagggtggggagggatgaccag

SEQ ID NO: 3609 - RNA, 25 nt, Homo sapiens
  source 1..25: mol_type = unassigned RNA
gagggccttggagagagggtgggga

SEQ ID NO: 3610 - RNA, 25 nt, Homo sapiens
  source 1..25: mol_type = unassigned RNA
agagggccttggagagagggtgggg

SEQ ID NO: 3611 - RNA, 25 nt, Homo sapiens
  source 1..25: mol_type = unassigned RNA
aggagagggccttggagagagggtg

SEQ ID NO: 3612 - RNA, 25 nt, Homo sapiens
  source 1..25: mol_type = unassigned RNA
caggagagggccttggagagagggt

SEQ ID NO: 3613 - RNA, 25 nt, Homo sapiens
  source 1..25: mol_type = unassigned RNA
ccaggagagggccttggagagaggg

SEQ ID NO: 3614 - RNA, 25 nt, Homo sapiens
  source 1..25: mol_type = unassigned RNA
agaccaggagagggccttggagaga

SEQ ID NO: 3615 - RNA, 25 nt, Homo sapiens
  source 1..25: mol_type = unassigned RNA
gagaccaggagagggccttggagag

SEQ ID NO: 3616 - RNA, 25 nt, Homo sapiens
  source 1..25: mol_type = unassigned RNA
aagaagggagaccaggagagggcct

SEQ ID NO: 3617 - RNA, 25 nt, Homo sapiens
  source 1..25: mol_type = unassigned RNA
ttctagaagaagggagaccaggaga

SEQ ID NO: 3618 - RNA, 25 nt, Homo sapiens
  source 1..25: mol_type = unassigned RNA
gttctagaagaagggagaccaggag

SEQ ID NO: 3619 - RNA, 25 nt, Homo sapiens
  source 1..25: mol_type = unassigned RNA
aaggggttctagaagaagggagacc

SEQ ID NO: 3620 - RNA, 25 nt, Homo sapiens
  source 1..25: mol_type = unassigned RNA
ggtggaggaaggggttctagaagaa

SEQ ID NO: 3621 - RNA, 25 nt, Homo sapiens
  source 1..25: mol_type = unassigned RNA
aggtggaggaaggggttctagaaga

SEQ ID NO: 3622 - RNA, 25 nt, Homo sapiens
  source 1..25: mol_type = unassigned RNA
tctgcagagagggaggtggaggaag

SEQ ID NO: 3623 - RNA, 25 nt, Homo sapiens
  source 1..25: mol_type = unassigned RNA
ttctgcagagagggaggtggaggaa

SEQ ID NO: 3624 - RNA, 25 nt, Homo sapiens
  source 1..25: mol_type = unassigned RNA
gttctgcagagagggaggtggagga

SEQ ID NO: 3625 - RNA, 25 nt, Homo sapiens
  source 1..25: mol_type = unassigned RNA
agaagttctgcagagagggaggtgg

SEQ ID NO: 3626 - RNA, 25 nt, Homo sapiens
  source 1..25: mol_type = unassigned RNA
aggagaagttctgcagagagggagg

SEQ ID NO: 3627 - RNA, 25 nt, Homo sapiens
  source 1..25: mol_type = unassigned RNA
taaaggagaagttctgcagagaggg

SEQ ID NO: 3628 - RNA, 25 nt, Homo sapiens
  source 1..25: mol_type = unassigned RNA
gggtaaaggagaagttctgcagaga

SEQ ID NO: 3629 - RNA, 25 nt, Homo sapiens
  source 1..25: mol_type = unassigned RNA
ggggtaaaggagaagttctgcagag

SEQ ID NO: 3630 - RNA, 25 nt, Homo sapiens
  source 1..25: mol_type = unassigned RNA
ggcagtggtggggggtggggggtaa

SEQ ID NO: 3631 - RNA, 25 nt, Homo sapiens
  source 1..25: mol_type = unassigned RNA
aaagggggcagtggtggggggtggg

SEQ ID NO: 3632 - RNA, 25 nt, Homo sapiens
  source 1..25: mol_type = unassigned RNA
gaaagggggcagtggtggggggtgg

SEQ ID NO: 3633 - RNA, 25 nt, Homo sapiens
  source 1..25: mol_type = unassigned RNA
ggaaagggggcagtggtggggggtg

SEQ ID NO: 3634 - RNA, 25 nt, Homo sapiens
  source 1..25: mol_type = unassigned RNA
aggaaagggggcagtggtggggggt

SEQ ID NO: 3635 - RNA, 25 nt, Homo sapiens
  source 1..25: mol_type = unassigned RNA
aaggaaagggggcagtggtgggggg

SEQ ID NO: 3636 - RNA, 25 nt, Homo sapiens
  source 1..25: mol_type = unassigned RNA
gaaaaggaaagggggcagtggtggg

SEQ ID NO: 3637 - RNA, 25 nt, Homo sapiens
  source 1..25: mol_type = unassigned RNA
agaaaaggaaagggggcagtggtgg

SEQ ID NO: 3638 - RNA, 25 nt, Homo sapiens
  source 1..25: mol_type = unassigned RNA
cagaaaaggaaagggggcagtggtg

SEQ ID NO: 3639 - RNA, 25 nt, Homo sapiens
  source 1..25: mol_type = unassigned RNA
tcagaaaaggaaagggggcagtggt

SEQ ID NO: 3640 - RNA, 25 nt, Homo sapiens
  source 1..25: mol_type = unassigned RNA
gtcagaaaaggaaagggggcagtgg

SEQ ID NO: 3641 - RNA, 25 nt, Homo sapiens
  source 1..25: mol_type = unassigned RNA
gaggtcagaaaaggaaagggggcag

SEQ ID NO: 3642 - RNA, 25 nt, Homo sapiens
  source 1..25: mol_type = unassigned RNA
caaaaggaggtcagaaaaggaaagg

SEQ ID NO: 3643 - RNA, 25 nt, Homo sapiens
  source 1..25: mol_type = unassigned RNA
ccaaaaggaggtcagaaaaggaaag

SEQ ID NO: 3644 - RNA, 25 nt, Homo sapiens
  source 1..25: mol_type = unassigned RNA
tccaaaaggaggtcagaaaaggaaa

SEQ ID NO: 3645 - RNA, 25 nt, Homo sapiens
  source 1..25: mol_type = unassigned RNA
ctccaaaaggaggtcagaaaaggaa

SEQ ID NO: 3646 - RNA, 25 nt, Homo sapiens
  source 1..25: mol_type = unassigned RNA
gagccctccaaaaggaggtcagaaa

SEQ ID NO: 3647 - RNA, 25 nt, Homo sapiens
  source 1..25: mol_type = unassigned RNA
gggcagcgctgagccctccaaaagg

SEQ ID NO: 3648 - RNA, 25 nt, Homo sapiens
  source 1..25: mol_type = unassigned RNA
tctgggcagcgctgagccctccaaa

SEQ ID NO: 3649 - RNA, 25 nt, Homo sapiens
  source 1..25: mol_type = unassigned RNA
gcctcccacatctctcctatggtct

SEQ ID NO: 3650 - RNA, 25 nt, Homo sapiens
  source 1..25: mol_type = unassigned RNA
agcctcccacatctctcctatggtc

SEQ ID NO: 3651 - RNA, 25 nt, Homo sapiens
  source 1..25: mol_type = unassigned RNA
aactgagcctcccacatctctccta

SEQ ID NO: 3652 - RNA, 25 nt, Homo sapiens
  source 1..25: mol_type = unassigned RNA
aagcggctgcagaaacagcaagccc

SEQ ID NO: 3653 - RNA, 25 nt, Homo sapiens
  source 1..25: mol_type = unassigned RNA
ccgttttacctggagccacccaaag

SEQ ID NO: 3654 - RNA, 25 nt, Homo sapiens
  source 1..25: mol_type = unassigned RNA
accctcccgccatccccgttttacc

SEQ ID NO: 3655 - RNA, 25 nt, Homo sapiens
  source 1..25: mol_type = unassigned RNA
ctcacctagtgaagcctctccagcc

SEQ ID NO: 3656 - RNA, 25 nt, Homo sapiens
  source 1..25: mol_type = unassigned RNA
tcacctagtgaagcctctccagcca

SEQ ID NO: 3657 - RNA, 25 nt, Homo sapiens
  source 1..25: mol_type = unassigned RNA
cacctagtgaagcctctccagccag

SEQ ID NO: 3658 - RNA, 25 nt, Homo sapiens
  source 1..25: mol_type = unassigned RNA
gtgaagcctctccagccaggggctg

SEQ ID NO: 3659 - RNA, 25 nt, Homo sapiens
  source 1..25: mol_type = unassigned RNA
cctctccagccaggggctgaggtcc

SEQ ID NO: 3660 - RNA, 25 nt, Homo sapiens
  source 1..25: mol_type = unassigned RNA
ctccagccaggggctgaggtcccgg

SEQ ID NO: 3661 - RNA, 25 nt, Homo sapiens
  source 1..25: mol_type = unassigned RNA
gccaggggctgaggtcccggtggtg

SEQ ID NO: 3662 - RNA, 25 nt, Homo sapiens
  source 1..25: mol_type = unassigned RNA
ccaggggctgaggtcccggtggtgt

SEQ ID NO: 3663 - RNA, 25 nt, Homo sapiens
  source 1..25: mol_type = unassigned RNA
gctgaggtcccggtggtgtgggccc

SEQ ID NO: 3664 - RNA, 25 nt, Homo sapiens
  source 1..25: mol_type = unassigned RNA
gaggtcccggtggtgtgggcccagg

SEQ ID NO: 3665 - RNA, 25 nt, Homo sapiens
  source 1..25: mol_type = unassigned RNA
aggtcccggtggtgtgggcccagga

SEQ ID NO: 3666 - RNA, 25 nt, Homo sapiens
  source 1..25: mol_type = unassigned RNA
ggtcccggtggtgtgggcccaggag

SEQ ID NO: 3667 - RNA, 25 nt, Homo sapiens
  source 1..25: mol_type = unassigned RNA
gtcccggtggtgtgggcccaggagg

SEQ ID NO: 3668 - RNA, 25 nt, Homo sapiens
  source 1..25: mol_type = unassigned RNA
ccctgcagccccacaatccccctcc

SEQ ID NO: 3669 - RNA, 25 nt, Homo sapiens
  source 1..25: mol_type = unassigned RNA
aggatctcagccttctgcgaagagc

SEQ ID NO: 3670 - RNA, 25 nt, Homo sapiens
  source 1..25: mol_type = unassigned RNA
ggatctcagccttctgcgaagagca

SEQ ID NO: 3671 - RNA, 25 nt, Homo sapiens
  source 1..25: mol_type = unassigned RNA
gatctcagccttctgcgaagagcag

SEQ ID NO: 3672 - RNA, 25 nt, Homo sapiens
  source 1..25: mol_type = unassigned RNA
ccttctgcgaagagcaggggtcact

SEQ ID NO: 3673 - RNA, 25 nt, Homo sapiens
  source 1..25: mol_type = unassigned RNA
ggtcacttggcagcatcagccagac

SEQ ID NO: 3674 - RNA, 25 nt, Homo sapiens
  source 1..25: mol_type = unassigned RNA
gccagacaggtatgcaccccaaact

SEQ ID NO: 3675 - RNA, 25 nt, Homo sapiens
  source 1..25: mol_type = unassigned RNA
ccagacaggtatgcaccccaaactt

SEQ ID NO: 3676 - RNA, 25 nt, Homo sapiens
  source 1..25: mol_type = unassigned RNA
aggcttcactaggtgagcaaaagag

SEQ ID NO: 3677 - RNA, 25 nt, Homo sapiens
  source 1..25: mol_type = unassigned RNA
agcccctggctggagaggcttcact

SEQ ID NO: 3678 - RNA, 25 nt, Homo sapiens
  source 1..25: mol_type = unassigned RNA
ccgggacctcagcccctggctggag

SEQ ID NO: 3679 - RNA, 25 nt, Homo sapiens
  source 1..25: mol_type = unassigned RNA
caccaccgggacctcagcccctggc

SEQ ID NO: 3680 - RNA, 25 nt, Homo sapiens
  source 1..25: mol_type = unassigned RNA
cccacaccaccgggacctcagcccc

SEQ ID NO: 3681 - RNA, 25 nt, Homo sapiens
  source 1..25: mol_type = unassigned RNA
agccccctcctgggcccacaccacc

SEQ ID NO: 3682 - RNA, 25 nt, Homo sapiens
  source 1..25: mol_type = unassigned RNA
gagccccctcctgggcccacaccac

SEQ ID NO: 3683 - RNA, 25 nt, Homo sapiens
  source 1..25: mol_type = unassigned RNA
gggagctgggcaggagccccctcct

SEQ ID NO: 3684 - RNA, 25 nt, Homo sapiens
  source 1..25: mol_type = unassigned RNA
ggggagctgggcaggagccccctcc

SEQ ID NO: 3685 - RNA, 25 nt, Homo sapiens
  source 1..25: mol_type = unassigned RNA
ttgtggggctgcaggggagctgggc

SEQ ID NO: 3686 - RNA, 25 nt, Homo sapiens
  source 1..25: mol_type = unassigned RNA
gggattgtggggctgcaggggagct

SEQ ID NO: 3687 - RNA, 25 nt, Homo sapiens
  source 1..25: mol_type = unassigned RNA
ggggattgtggggctgcaggggagc

SEQ ID NO: 3688 - RNA, 25 nt, Homo sapiens
  source 1..25: mol_type = unassigned RNA
ctggagggggattgtggggctgcag

SEQ ID NO: 3689 - RNA, 25 nt, Homo sapiens
  source 1..25: mol_type = unassigned RNA
cctggagggggattgtggggctgca

SEQ ID NO: 3690 - RNA, 25 nt, Homo sapiens
  source 1..25: mol_type = unassigned RNA
tcctggagggggattgtggggctgc

SEQ ID NO: 3691 - RNA, 25 nt, Homo sapiens
  source 1..25: mol_type = unassigned RNA
gctgagatcctggagggggattgtg

SEQ ID NO: 3692 - RNA, 25 nt, Homo sapiens
  source 1..25: mol_type = unassigned RNA
ggctgagatcctggagggggattgt

SEQ ID NO: 3693 - RNA, 25 nt, Homo sapiens
  source 1..25: mol_type = unassigned RNA
aggctgagatcctggagggggattg

SEQ ID NO: 3694 - RNA, 25 nt, Homo sapiens
  source 1..25: mol_type = unassigned RNA
tcgcagaaggctgagatcctggagg

SEQ ID NO: 3695 - RNA, 25 nt, Homo sapiens
  source 1..25: mol_type = unassigned RNA
ttcgcagaaggctgagatcctggag

SEQ ID NO: 3696 - RNA, 25 nt, Homo sapiens
  source 1..25: mol_type = unassigned RNA
cttcgcagaaggctgagatcctgga

SEQ ID NO: 3697 - RNA, 25 nt, Homo sapiens
  source 1..25: mol_type = unassigned RNA
tcttcgcagaaggctgagatcctgg

SEQ ID NO: 3698 - RNA, 25 nt, Homo sapiens
  source 1..25: mol_type = unassigned RNA
tgctcttcgcagaaggctgagatcc

SEQ ID NO: 3699 - RNA, 25 nt, Homo sapiens
  source 1..25: mol_type = unassigned RNA
ccaagtgacccctgctcttcgcaga

SEQ ID NO: 3700 - RNA, 25 nt, Homo sapiens
  source 1..25: mol_type = unassigned RNA
cccaagtttggggtgcatacctgtc

SEQ ID NO: 3701 - RNA, 25 nt, Homo sapiens
  source 1..25: mol_type = unassigned RNA
caactccattctctttcccgcccag

SEQ ID NO: 3702 - RNA, 25 nt, Homo sapiens
  source 1..25: mol_type = unassigned RNA
ccagtggcccgcccgctgccgcccc

SEQ ID NO: 3703 - RNA, 25 nt, Homo sapiens
  source 1..25: mol_type = unassigned RNA
cccgctgccgcccccggccatcccc

SEQ ID NO: 3704 - RNA, 25 nt, Homo sapiens
  source 1..25: mol_type = unassigned RNA
ccgcccccggccatcccctggcccc

SEQ ID NO: 3705 - RNA, 25 nt, Homo sapiens
  source 1..25: mol_type = unassigned RNA
catcccctggcccccggccctcacc

SEQ ID NO: 3706 - RNA, 25 nt, Homo sapiens
  source 1..25: mol_type = unassigned RNA
cccctggcccccggccctcacccgg

SEQ ID NO: 3707 - RNA, 25 nt, Homo sapiens
  source 1..25: mol_type = unassigned RNA
ccctcacccggcggcgccctcctcc

SEQ ID NO: 3708 - RNA, 25 nt, Homo sapiens
  source 1..25: mol_type = unassigned RNA
cctcacccggcggcgccctcctcct

SEQ ID NO: 3709 - RNA, 25 nt, Homo sapiens
  source 1..25: mol_type = unassigned RNA
ctcacccggcggcgccctcctcctg

SEQ ID NO: 3710 - RNA, 25 nt, Homo sapiens
  source 1..25: mol_type = unassigned RNA
tcacccggcggcgccctcctcctgg

SEQ ID NO: 3711 - RNA, 25 nt, Homo sapiens
  source 1..25: mol_type = unassigned RNA
ggcggcgccctcctcctgggggccc

SEQ ID NO: 3712 - RNA, 25 nt, Homo sapiens
  source 1..25: mol_type = unassigned RNA
tgggggcccaggccccgccgctaca

SEQ ID NO: 3713 - RNA, 25 nt, Homo sapiens
  source 1..25: mol_type = unassigned RNA
ccccgccgctacacggtgctgagcg

SEQ ID NO: 3714 - RNA, 25 nt, Homo sapiens
  source 1..25: mol_type = unassigned RNA
cccgccgctacacggtgctgagcgt

SEQ ID NO: 3715 - RNA, 25 nt, Homo sapiens
  source 1..25: mol_type = unassigned RNA
gctacacggtgctgagcgtgggtcc

SEQ ID NO: 3716 - RNA, 25 nt, Homo sapiens
  source 1..25: mol_type = unassigned RNA
acacggtgctgagcgtgggtcccgg

SEQ ID NO: 3717 - RNA, 25 nt, Homo sapiens
  source 1..25: mol_type = unassigned RNA
gcgtgggtcccggaggcctgcgcag

SEQ ID NO: 3718 - RNA, 25 nt, Homo sapiens
  source 1..25: mol_type = unassigned RNA
cgtgggtcccggaggcctgcgcagc

SEQ ID NO: 3719 - RNA, 25 nt, Homo sapiens
  source 1..25: mol_type = unassigned RNA
gggtcccggaggcctgcgcagcggg

SEQ ID NO: 3720 - RNA, 25 nt, Homo sapiens
  source 1..25: mol_type = unassigned RNA
ctgcccctgcagccccgcgtccagc

SEQ ID NO: 3721 - RNA, 25 nt, Homo sapiens
  source 1..25: mol_type = unassigned RNA
agccccgcgtccagctggatgagcg

SEQ ID NO: 3722 - RNA, 25 nt, Homo sapiens
  source 1..25: mol_type = unassigned RNA
ccgcgtccagctggatgagcgcggc

SEQ ID NO: 3723 - RNA, 25 nt, Homo sapiens
  source 1..25: mol_type = unassigned RNA
agctggatgagcgcggccggcagcg

SEQ ID NO: 3724 - RNA, 25 nt, Homo sapiens
  source 1..25: mol_type = unassigned RNA
gctggatgagcgcggccggcagcgc

SEQ ID NO: 3725 - RNA, 25 nt, Homo sapiens
  source 1..25: mol_type = unassigned RNA
ctggatgagcgcggccggcagcgcg

SEQ ID NO: 3726 - RNA, 25 nt, Homo sapiens
  source 1..25: mol_type = unassigned RNA
ccggcagcgcggggacttctcgcta

SEQ ID NO: 3727 - RNA, 25 nt, Homo sapiens
  source 1..25: mol_type = unassigned RNA
cttctcgctatggctgcgcccagcc

SEQ ID NO: 3728 - RNA, 25 nt, Homo sapiens
  source 1..25: mol_type = unassigned RNA
ctatggctgcgcccagcccggcgcg

SEQ ID NO: 3729 - RNA, 25 nt, Homo sapiens
  source 1..25: mol_type = unassigned RNA
tgcgcccagcccggcgcgcggacgc

SEQ ID NO: 3730 - RNA, 25 nt, Homo sapiens
  source 1..25: mol_type = unassigned RNA
gcggacgccggcgagtaccgcgccg

SEQ ID NO: 3731 - RNA, 25 nt, Homo sapiens
  source 1..25: mol_type = unassigned RNA
cgagtaccgcgccgcggtgcacctc

SEQ ID NO: 3732 - RNA, 25 nt, Homo sapiens
  source 1..25: mol_type = unassigned RNA
gagtaccgcgccgcggtgcacctca

SEQ ID NO: 3733 - RNA, 25 nt, Homo sapiens
  source 1..25: mol_type = unassigned RNA
gcgcctgggccaggcctcgagtatg

SEQ ID NO: 3734 - RNA, 25 nt, Homo sapiens
  source 1..25: mol_type = unassigned RNA
cgcctgggccaggcctcgagtatgt

SEQ ID NO: 3735 - RNA, 25 nt, Homo sapiens
  source 1..25: mol_type = unassigned RNA
gcctgggccaggcctcgagtatgtg

SEQ ID NO: 3736 - RNA, 25 nt, Homo sapiens
  source 1..25: mol_type = unassigned RNA
tgggccaggcctcgagtatgtgggg

SEQ ID NO: 3737 - RNA, 25 nt, Homo sapiens
  source 1..25: mol_type = unassigned RNA
gggccaggcctcgagtatgtggggc

SEQ ID NO: 3738 - RNA, 25 nt, Homo sapiens
  source 1..25: mol_type = unassigned RNA
gcctcgagtatgtggggcgggacga

SEQ ID NO: 3739 - RNA, 25 nt, Homo sapiens
  source 1..25: mol_type = unassigned RNA
cctcgagtatgtggggcgggacgat

SEQ ID NO: 3740 - RNA, 25 nt, Homo sapiens
  source 1..25: mol_type = unassigned RNA
gcgggccactgggcgggaaagagaa

SEQ ID NO: 3741 - RNA, 25 nt, Homo sapiens
  source 1..25: mol_type = unassigned RNA
ggcggcagcgggcgggccactgggc

SEQ ID NO: 3742 - RNA, 25 nt, Homo sapiens
  source 1..25: mol_type = unassigned RNA
gggcggcagcgggcgggccactggg

SEQ ID NO: 3743 - RNA, 25 nt, Homo sapiens
  source 1..25: mol_type = unassigned RNA
cgggggcggcagcgggcgggccact

SEQ ID NO: 3744 - RNA, 25 nt, Homo sapiens
  source 1..25: mol_type = unassigned RNA
ccgggggcggcagcgggcgggccac

SEQ ID NO: 3745 - RNA, 25 nt, Homo sapiens
  source 1..25: mol_type = unassigned RNA
gggatggccgggggcggcagcgggc

SEQ ID NO: 3746 - RNA, 25 nt, Homo sapiens
  source 1..25: mol_type = unassigned RNA
ggggatggccgggggcggcagcggg

SEQ ID NO: 3747 - RNA, 25 nt, Homo sapiens
  source 1..25: mol_type = unassigned RNA
ccaggggatggccgggggcggcagc

SEQ ID NO: 3748 - RNA, 25 nt, Homo sapiens
  source 1..25: mol_type = unassigned RNA
gccaggggatggccgggggcggcag

SEQ ID NO: 3749 - RNA, 25 nt, Homo sapiens
  source 1..25: mol_type = unassigned RNA
ccgggggccaggggatggccggggg

SEQ ID NO: 3750 - RNA, 25 nt, Homo sapiens
  source 1..25: mol_type = unassigned RNA
gggccgggggccaggggatggccgg

SEQ ID NO: 3751 - RNA, 25 nt, Homo sapiens
  source 1..25: mol_type = unassigned RNA
agggccgggggccaggggatggccg

SEQ ID NO: 3752 - RNA, 25 nt, Homo sapiens
  source 1..25: mol_type = unassigned RNA
gagggccgggggccaggggatggcc

SEQ ID NO: 3753 - RNA, 25 nt, Homo sapiens
  source 1..25: mol_type = unassigned RNA
tgagggccgggggccaggggatggc

SEQ ID NO: 3754 - RNA, 25 nt, Homo sapiens
  source 1..25: mol_type = unassigned RNA
cgggtgagggccgggggccagggga

SEQ ID NO: 3755 - RNA, 25 nt, Homo sapiens
  source 1..25: mol_type = unassigned RNA
ccgccgggtgagggccgggggccag

SEQ ID NO: 3756 - RNA, 25 nt, Homo sapiens
  source 1..25: mol_type = unassigned RNA
gccgccgggtgagggccgggggcca

SEQ ID NO: 3757 - RNA, 25 nt, Homo sapiens
  source 1..25: mol_type = unassigned RNA
cgccgccgggtgagggccgggggcc

SEQ ID NO: 3758 - RNA, 25 nt, Homo sapiens
  source 1..25: mol_type = unassigned RNA
gagggcgccgccgggtgagggccgg

SEQ ID NO: 3759 - RNA, 25 nt, Homo sapiens
  source 1..25: mol_type = unassigned RNA
ggagggcgccgccgggtgagggccg

SEQ ID NO: 3760 - RNA, 25 nt, Homo sapiens
  source 1..25: mol_type = unassigned RNA
aggagggcgccgccgggtgagggcc

SEQ ID NO: 3761 - RNA, 25 nt, Homo sapiens
  source 1..25: mol_type = unassigned RNA
gaggagggcgccgccgggtgagggc

SEQ ID NO: 3762 - RNA, 25 nt, Homo sapiens
  source 1..25: mol_type = unassigned RNA
ccaggaggagggcgccgccgggtga

SEQ ID NO: 3763 - RNA, 25 nt, Homo sapiens
  source 1..25: mol_type = unassigned RNA
cccaggaggagggcgccgccgggtg

SEQ ID NO: 3764 - RNA, 25 nt, Homo sapiens
  source 1..25: mol_type = unassigned RNA
gggcccccaggaggagggcgccgcc

SEQ ID NO: 3765 - RNA, 25 nt, Homo sapiens
  source 1..25: mol_type = unassigned RNA
tgggcccccaggaggagggcgccgc

SEQ ID NO: 3766 - RNA, 25 nt, Homo sapiens
  source 1..25: mol_type = unassigned RNA
ggcggggcctgggcccccaggagga

SEQ ID NO: 3767 - RNA, 25 nt, Homo sapiens
  source 1..25: mol_type = unassigned RNA
cggcggggcctgggcccccaggagg

SEQ ID NO: 3768 - RNA, 25 nt, Homo sapiens
  source 1..25: mol_type = unassigned RNA
tagcggcggggcctgggcccccagg

SEQ ID NO: 3769 - RNA, 25 nt, Homo sapiens
  source 1..25: mol_type = unassigned RNA
gtgtagcggcggggcctgggccccc

SEQ ID NO: 3770 - RNA, 25 nt, Homo sapiens
  source 1..25: mol_type = unassigned RNA
tcagcaccgtgtagcggcggggcct

SEQ ID NO: 3771 - RNA, 25 nt, Homo sapiens
  source 1..25: mol_type = unassigned RNA
ctcagcaccgtgtagcggcggggcc

SEQ ID NO: 3772 - RNA, 25 nt, Homo sapiens
  source 1..25: mol_type = unassigned RNA
ccacgctcagcaccgtgtagcggcg

SEQ ID NO: 3773 - RNA, 25 nt, Homo sapiens
  source 1..25: mol_type = unassigned RNA
cccacgctcagcaccgtgtagcggc

SEQ ID NO: 3774 - RNA, 25 nt, Homo sapiens
  source 1..25: mol_type = unassigned RNA
acccacgctcagcaccgtgtagcgg

SEQ ID NO: 3775 - RNA, 25 nt, Homo sapiens
  source 1..25: mol_type = unassigned RNA
gggacccacgctcagcaccgtgtag

SEQ ID NO: 3776 - RNA, 25 nt, Homo sapiens
  source 1..25: mol_type = unassigned RNA
gcagcctcccgctgcgcaggcctcc

SEQ ID NO: 3777 - RNA, 25 nt, Homo sapiens
  source 1..25: mol_type = unassigned RNA
ggcagcctcccgctgcgcaggcctc

SEQ ID NO: 3778 - RNA, 25 nt, Homo sapiens
  source 1..25: mol_type = unassigned RNA
ctgcaggggcagcctcccgctgcgc

SEQ ID NO: 3779 - RNA, 25 nt, Homo sapiens
  source 1..25: mol_type = unassigned RNA
catccagctggacgcggggctgcag

SEQ ID NO: 3780 - RNA, 25 nt, Homo sapiens
  source 1..25: mol_type = unassigned RNA
tcatccagctggacgcggggctgca

SEQ ID NO: 3781 - RNA, 25 nt, Homo sapiens
  source 1..25: mol_type = unassigned RNA
ctcatccagctggacgcggggctgc

SEQ ID NO: 3782 - RNA, 25 nt, Homo sapiens
  source 1..25: mol_type = unassigned RNA
ggccgcgctcatccagctggacgcg

SEQ ID NO: 3783 - RNA, 25 nt, Homo sapiens
  source 1..25: mol_type = unassigned RNA
cggccgcgctcatccagctggacgc

SEQ ID NO: 3784 - RNA, 25 nt, Homo sapiens
  source 1..25: mol_type = unassigned RNA
ccggccgcgctcatccagctggacg

SEQ ID NO: 3785 - RNA, 25 nt, Homo sapiens
  source 1..25: mol_type = unassigned RNA
gcgctgccggccgcgctcatccagc

SEQ ID NO: 3786 - RNA, 25 nt, Homo sapiens
  source 1..25: mol_type = unassigned RNA
ccatagcgagaagtccccgcgctgc

SEQ ID NO: 3787 - RNA, 25 nt, Homo sapiens
  source 1..25: mol_type = unassigned RNA
ctcgccggcgtccgcgcgccgggct

SEQ ID NO: 3788 - RNA, 25 nt, Homo sapiens
  source 1..25: mol_type = unassigned RNA
actcgccggcgtccgcgcgccgggc

SEQ ID NO: 3789 - RNA, 25 nt, Homo sapiens
  source 1..25: mol_type = unassigned RNA
cggtactcgccggcgtccgcgcgcc

SEQ ID NO: 3790 - RNA, 25 nt, Homo sapiens
  source 1..25: mol_type = unassigned RNA
gcggtactcgccggcgtccgcgcgc

SEQ ID NO: 3791 - RNA, 25 nt, Homo sapiens
  source 1..25: mol_type = unassigned RNA
aggtgcaccgcggcgcggtactcgc

SEQ ID NO: 3792 - RNA, 25 nt, Homo sapiens
  source 1..25: mol_type = unassigned RNA
cgggtccctgaggtgcaccgcggcg

SEQ ID NO: 3793 - RNA, 25 nt, Homo sapiens
  source 1..25: mol_type = unassigned RNA
tcccgcgggtccctgaggtgcaccg

SEQ ID NO: 3794 - RNA, 25 nt, Homo sapiens
  source 1..25: mol_type = unassigned RNA
cgccgtcctctcccgcgggtccctg

SEQ ID NO: 3795 - RNA, 25 nt, Homo sapiens
  source 1..25: mol_type = unassigned RNA
gtctgcctccgccgtcctctcccgc

SEQ ID NO: 3796 - RNA, 25 nt, Homo sapiens
  source 1..25: mol_type = unassigned RNA
cttgcacagtgactgccagcccccc

SEQ ID NO: 3797 - RNA, 25 nt, Homo sapiens
  source 1..25: mol_type = unassigned RNA
cccaggatctctcagagcctccgac

SEQ ID NO: 3798 - RNA, 25 nt, Homo sapiens
  source 1..25: mol_type = unassigned RNA
ccaggatctctcagagcctccgact

SEQ ID NO: 3799 - RNA, 25 nt, Homo sapiens
  source 1..25: mol_type = unassigned RNA
ccctgaccgcccagcctctgtgcat

SEQ ID NO: 3800 - RNA, 25 nt, Homo sapiens
  source 1..25: mol_type = unassigned RNA
ccgcccagcctctgtgcattggttc

SEQ ID NO: 3801 - RNA, 25 nt, Homo sapiens
  source 1..25: mol_type = unassigned RNA
agcctctgtgcattggttccggaac

SEQ ID NO: 3802 - RNA, 25 nt, Homo sapiens
  source 1..25: mol_type = unassigned RNA
gcctctgtgcattggttccggaacc

SEQ ID NO: 3803 - RNA, 25 nt, Homo sapiens
  source 1..25: mol_type = unassigned RNA
cctctgtgcattggttccggaaccg

SEQ ID NO: 3804 - RNA, 25 nt, Homo sapiens
  source 1..25: mol_type = unassigned RNA
gtgcattggttccggaaccggggcc

SEQ ID NO: 3805 - RNA, 25 nt, Homo sapiens
  source 1..25: mol_type = unassigned RNA
tgcattggttccggaaccggggcca

SEQ ID NO: 3806 - RNA, 25 nt, Homo sapiens
  source 1..25: mol_type = unassigned RNA
ccggggccagggccgagtccctgtc

SEQ ID NO: 3807 - RNA, 25 nt, Homo sapiens
  source 1..25: mol_type = unassigned RNA
cggggccagggccgagtccctgtcc

SEQ ID NO: 3808 - RNA, 25 nt, Homo sapiens
  source 1..25: mol_type = unassigned RNA
cgggagtccccccatcaccacttag

SEQ ID NO: 3809 - RNA, 25 nt, Homo sapiens
  source 1..25: mol_type = unassigned RNA
ctcttcctgccccaagtcagcccca

SEQ ID NO: 3810 - RNA, 25 nt, Homo sapiens
  source 1..25: mol_type = unassigned RNA
tgccccaagtcagccccatggactc

SEQ ID NO: 3811 - RNA, 25 nt, Homo sapiens
  source 1..25: mol_type = unassigned RNA
gccccaagtcagccccatggactct

SEQ ID NO: 3812 - RNA, 25 nt, Homo sapiens
  source 1..25: mol_type = unassigned RNA
agtcagccccatggactctgggccc

SEQ ID NO: 3813 - RNA, 25 nt, Homo sapiens
  source 1..25: mol_type = unassigned RNA
gtcagccccatggactctgggccct

SEQ ID NO: 3814 - RNA, 25 nt, Homo sapiens
  source 1..25: mol_type = unassigned RNA
tcagccccatggactctgggccctg

SEQ ID NO: 3815 - RNA, 25 nt, Homo sapiens
  source 1..25: mol_type = unassigned RNA
ggggctgcatcctcacctacagaga

SEQ ID NO: 3816 - RNA, 25 nt, Homo sapiens
  source 1..25: mol_type = unassigned RNA
tccatcatgtataacctcactgttc

SEQ ID NO: 3817 - RNA, 25 nt, Homo sapiens
  source 1..25: mol_type = unassigned RNA
ccatcatgtataacctcactgttct

SEQ ID NO: 3818 - RNA, 25 nt, Homo sapiens
  source 1..25: mol_type = unassigned RNA
ctggggggctggcagtcactgtgca

SEQ ID NO: 3819 - RNA, 25 nt, Homo sapiens
  source 1..25: mol_type = unassigned RNA
gaggctctgagagatcctggggggc

SEQ ID NO: 3820 - RNA, 25 nt, Homo sapiens
  source 1..25: mol_type = unassigned RNA
gtcggaggctctgagagatcctggg

SEQ ID NO: 3821 - RNA, 25 nt, Homo sapiens
  source 1..25: mol_type = unassigned RNA
agtcggaggctctgagagatcctgg

SEQ ID NO: 3822 - RNA, 25 nt, Homo sapiens
  source 1..25: mol_type = unassigned RNA
cagtcggaggctctgagagatcctg

SEQ ID NO: 3823 - RNA, 25 nt, Homo sapiens
  source 1..25: mol_type = unassigned RNA
ccagtcggaggctctgagagatcct

SEQ ID NO: 3824 - RNA, 25 nt, Homo sapiens
  source 1..25: mol_type = unassigned RNA
cccagtcggaggctctgagagatcc

SEQ ID NO: 3825 - RNA, 25 nt, Homo sapiens
  source 1..25: mol_type = unassigned RNA
gagcagttcaaaatgacccagtcgg

SEQ ID NO: 3826 - RNA, 25 nt, Homo sapiens
  source 1..25: mol_type = unassigned RNA
aaggagcagttcaaaatgacccagt

SEQ ID NO: 3827 - RNA, 25 nt, Homo sapiens
  source 1..25: mol_type = unassigned RNA
gaggctgggcggtcagggcggctga

SEQ ID NO: 3828 - RNA, 25 nt, Homo sapiens
  source 1..25: mol_type = unassigned RNA
atgcacagaggctgggcggtcaggg

SEQ ID NO: 3829 - RNA, 25 nt, Homo sapiens
  source 1..25: mol_type = unassigned RNA
ccaatgcacagaggctgggcggtca

SEQ ID NO: 3830 - RNA, 25 nt, Homo sapiens
  source 1..25: mol_type = unassigned RNA
accaatgcacagaggctgggcggtc

SEQ ID NO: 3831 - RNA, 25 nt, Homo sapiens
  source 1..25: mol_type = unassigned RNA
ccggaaccaatgcacagaggctggg

SEQ ID NO: 3832 - RNA, 25 nt, Homo sapiens
  source 1..25: mol_type = unassigned RNA
gttccggaaccaatgcacagaggct

SEQ ID NO: 3833 - RNA, 25 nt, Homo sapiens
  source 1..25: mol_type = unassigned RNA
ggttccggaaccaatgcacagaggc

SEQ ID NO: 3834 - RNA, 25 nt, Homo sapiens
  source 1..25: mol_type = unassigned RNA
ccccggttccggaaccaatgcacag

SEQ ID NO: 3835 - RNA, 25 nt, Homo sapiens
  source 1..25: mol_type = unassigned RNA
agggactcggccctggccccggttc

SEQ ID NO: 3836 - RNA, 25 nt, Homo sapiens
  source 1..25: mol_type = unassigned RNA
ccggacagggactcggccctggccc

SEQ ID NO: 3837 - RNA, 25 nt, Homo sapiens
  source 1..25: mol_type = unassigned RNA
ggactcccggacagggactcggccc

SEQ ID NO: 3838 - RNA, 25 nt, Homo sapiens
  source 1..25: mol_type = unassigned RNA
atggggggactcccggacagggact

SEQ ID NO: 3839 - RNA, 25 nt, Homo sapiens
  source 1..25: mol_type = unassigned RNA
gtggtgatggggggactcccggaca

SEQ ID NO: 3840 - RNA, 25 nt, Homo sapiens
  source 1..25: mol_type = unassigned RNA
agtggtgatggggggactcccggac

SEQ ID NO: 3841 - RNA, 25 nt, Homo sapiens
  source 1..25: mol_type = unassigned RNA
cgctaagtggtgatggggggactcc

SEQ ID NO: 3842 - RNA, 25 nt, Homo sapiens
  source 1..25: mol_type = unassigned RNA
aagctttccgctaagtggtgatggg

SEQ ID NO: 3843 - RNA, 25 nt, Homo sapiens
  source 1..25: mol_type = unassigned RNA
gaagctttccgctaagtggtgatgg

SEQ ID NO: 3844 - RNA, 25 nt, Homo sapiens
  source 1..25: mol_type = unassigned RNA
ggaagctttccgctaagtggtgatg

SEQ ID NO: 3845 - RNA, 25 nt, Homo sapiens
  source 1..25: mol_type = unassigned RNA
aggaagctttccgctaagtggtgat

SEQ ID NO: 3846 - RNA, 25 nt, Homo sapiens
  source 1..25: mol_type = unassigned RNA
gaggaagctttccgctaagtggtga

SEQ ID NO: 3847 - RNA, 25 nt, Homo sapiens
  source 1..25: mol_type = unassigned RNA
caggaagaggaagctttccgctaag

SEQ ID NO: 3848 - RNA, 25 nt, Homo sapiens
  source 1..25: mol_type = unassigned RNA
catggggctgacttggggcaggaag

SEQ ID NO: 3849 - RNA, 25 nt, Homo sapiens
  source 1..25: mol_type = unassigned RNA
agagtccatggggctgacttggggc

SEQ ID NO: 3850 - RNA, 25 nt, Homo sapiens
  source 1..25: mol_type = unassigned RNA
gcccagagtccatggggctgacttg

SEQ ID NO: 3851 - RNA, 25 nt, Homo sapiens
  source 1..25: mol_type = unassigned RNA
ggcccagagtccatggggctgactt

SEQ ID NO: 3852 - RNA, 25 nt, Homo sapiens
  source 1..25: mol_type = unassigned RNA
gggcccagagtccatggggctgact

SEQ ID NO: 3853 - RNA, 25 nt, Homo sapiens
  source 1..25: mol_type = unassigned RNA
gcagccccagggcccagagtccatg

SEQ ID NO: 3854 - RNA, 25 nt, Homo sapiens
  source 1..25: mol_type = unassigned RNA
tgcagccccagggcccagagtccat

SEQ ID NO: 3855 - RNA, 25 nt, Homo sapiens
  source 1..25: mol_type = unassigned RNA
atgcagccccagggcccagagtcca

SEQ ID NO: 3856 - RNA, 25 nt, Homo sapiens
  source 1..25: mol_type = unassigned RNA
ctctgtaggtgaggatgcagcccca

SEQ ID NO: 3857 - RNA, 25 nt, Homo sapiens
  source 1..25: mol_type = unassigned RNA
tctctgtaggtgaggatgcagcccc

SEQ ID NO: 3858 - RNA, 25 nt, Homo sapiens
  source 1..25: mol_type = unassigned RNA
gacgttgaagccatctctgtaggtg

SEQ ID NO: 3859 - RNA, 25 nt, Homo sapiens
  source 1..25: mol_type = unassigned RNA
atggagacgttgaagccatctctgt

SEQ ID NO: 3860 - RNA, 25 nt, Homo sapiens
  source 1..25: mol_type = unassigned RNA
cccagaacagtgaggttatacatga

SEQ ID NO: 3861 - RNA, 25 nt, Homo sapiens
  source 1..25: mol_type = unassigned RNA
agtgggggagttacccagaacagtg

SEQ ID NO: 3862 - RNA, 25 nt, Homo sapiens
  source 1..25: mol_type = unassigned RNA
ttgggttttcttttctcttcaggtc

SEQ ID NO: 3863 - RNA, 25 nt, Homo sapiens
  source 1..25: mol_type = unassigned RNA
ccccaactcccttgacagtgtacgc

SEQ ID NO: 3864 - RNA, 25 nt, Homo sapiens
  source 1..25: mol_type = unassigned RNA
ctcccttgacagtgtacgctggagc

SEQ ID NO: 3865 - RNA, 25 nt, Homo sapiens
  source 1..25: mol_type = unassigned RNA
gacagtgtacgctggagcaggttcc

SEQ ID NO: 3866 - RNA, 25 nt, Homo sapiens
  source 1..25: mol_type = unassigned RNA
acagtgtacgctggagcaggttcca

SEQ ID NO: 3867 - RNA, 25 nt, Homo sapiens
  source 1..25: mol_type = unassigned RNA
gtgtacgctggagcaggttccaggg

SEQ ID NO: 3868 - RNA, 25 nt, Homo sapiens
  source 1..25: mol_type = unassigned RNA
tgtacgctggagcaggttccagggt

SEQ ID NO: 3869 - RNA, 25 nt, Homo sapiens
  source 1..25: mol_type = unassigned RNA
gtacgctggagcaggttccagggtg

SEQ ID NO: 3870 - RNA, 25 nt, Homo sapiens
  source 1..25: mol_type = unassigned RNA
tggggctgccctgccgcctgcctgc

SEQ ID NO: 3871 - RNA, 25 nt, Homo sapiens
  source 1..25: mol_type = unassigned RNA
ctgccctgccgcctgcctgctggtg

SEQ ID NO: 3872 - RNA, 25 nt, Homo sapiens
  source 1..25: mol_type = unassigned RNA
tgccctgccgcctgcctgctggtgt

SEQ ID NO: 3873 - RNA, 25 nt, Homo sapiens
  source 1..25: mol_type = unassigned RNA
gccctgccgcctgcctgctggtgtg

SEQ ID NO: 3874 - RNA, 25 nt, Homo sapiens
  source 1..25: mol_type = unassigned RNA
ccgcctgcctgctggtgtggggacc

SEQ ID NO: 3875 - RNA, 25 nt, Homo sapiens
  source 1..25: mol_type = unassigned RNA
gacccggtctttcctcactgccaag

SEQ ID NO: 3876 - RNA, 25 nt, Homo sapiens
  source 1..25: mol_type = unassigned RNA
tcctcactgccaagtggactcctcc

SEQ ID NO: 3877 - RNA, 25 nt, Homo sapiens
  source 1..25: mol_type = unassigned RNA
cctcactgccaagtggactcctcct

SEQ ID NO: 3878 - RNA, 25 nt, Homo sapiens
  source 1..25: mol_type = unassigned RNA
ctcactgccaagtggactcctcctg

SEQ ID NO: 3879 - RNA, 25 nt, Homo sapiens
  source 1..25: mol_type = unassigned RNA
tcactgccaagtggactcctcctgg

SEQ ID NO: 3880 - RNA, 25 nt, Homo sapiens
  source 1..25: mol_type = unassigned RNA
ctgccaagtggactcctcctggggg

SEQ ID NO: 3881 - RNA, 25 nt, Homo sapiens
  source 1..25: mol_type = unassigned RNA
cctcctgggggaggccctgacctcc

SEQ ID NO: 3882 - RNA, 25 nt, Homo sapiens
  source 1..25: mol_type = unassigned RNA
ggggaggccctgacctcctggtgac

SEQ ID NO: 3883 - RNA, 25 nt, Homo sapiens
  source 1..25: mol_type = unassigned RNA
ctgacctcctggtgactggagacaa

SEQ ID NO: 3884 - RNA, 25 nt, Homo sapiens
  source 1..25: mol_type = unassigned RNA
aatggcgactttacccttcgactag

SEQ ID NO: 3885 - RNA, 25 nt, Homo sapiens
  source 1..25: mol_type = unassigned RNA
acccttcgactagaggatgtgagcc

SEQ ID NO: 3886 - RNA, 25 nt, Homo sapiens
  source 1..25: mol_type = unassigned RNA
cgactagaggatgtgagccaggccc

SEQ ID NO: 3887 - RNA, 25 nt, Homo sapiens
  source 1..25: mol_type = unassigned RNA
tagaggatgtgagccaggcccaggc

SEQ ID NO: 3888 - RNA, 25 nt, Homo sapiens
  source 1..25: mol_type = unassigned RNA
agaggatgtgagccaggcccaggct

SEQ ID NO: 3889 - RNA, 25 nt, Homo sapiens
  source 1..25: mol_type = unassigned RNA
acctacacctgccatatccatctgc

SEQ ID NO: 3890 - RNA, 25 nt, Homo sapiens
  source 1..25: mol_type = unassigned RNA
cagcagctcaatgccactgtcacat

SEQ ID NO: 3891 - RNA, 25 nt, Homo sapiens
  source 1..25: mol_type = unassigned RNA
ccactgtcacattggcaatcatcac

SEQ ID NO: 3892 - RNA, 25 nt, Homo sapiens
  source 1..25: mol_type = unassigned RNA
ttggcaatcatcacaggtcagcctc

SEQ ID NO: 3893 - RNA, 25 nt, Homo sapiens
  source 1..25: mol_type = unassigned RNA
gcaatcatcacaggtcagcctcagg

SEQ ID NO: 3894 - RNA, 25 nt, Homo sapiens
  source 1..25: mol_type = unassigned RNA
caatcatcacaggtcagcctcaggt

SEQ ID NO: 3895 - RNA, 25 nt, Homo sapiens
  source 1..25: mol_type = unassigned RNA
atcacaggtcagcctcaggtgggaa

SEQ ID NO: 3896 - RNA, 25 nt, Homo sapiens
  source 1..25: mol_type = unassigned RNA
cagcgtacactgtcaagggagttgg

SEQ ID NO: 3897 - RNA, 25 nt, Homo sapiens
  source 1..25: mol_type = unassigned RNA
ccagcgtacactgtcaagggagttg

SEQ ID NO: 3898 - RNA, 25 nt, Homo sapiens
  source 1..25: mol_type = unassigned RNA
tccagcgtacactgtcaagggagtt

SEQ ID NO: 3899 - RNA, 25 nt, Homo sapiens
  source 1..25: mol_type = unassigned RNA
ctccagcgtacactgtcaagggagt

SEQ ID NO: 3900 - RNA, 25 nt, Homo sapiens
  source 1..25: mol_type = unassigned RNA
aacctgctccagcgtacactgtcaa

SEQ ID NO: 3901 - RNA, 25 nt, Homo sapiens
  source 1..25: mol_type = unassigned RNA
gaacctgctccagcgtacactgtca

SEQ ID NO: 3902 - RNA, 25 nt, Homo sapiens
  source 1..25: mol_type = unassigned RNA
ggcaggcggcagggcagccccaccc

SEQ ID NO: 3903 - RNA, 25 nt, Homo sapiens
  source 1..25: mol_type = unassigned RNA
tccccacaccagcaggcaggcggca

SEQ ID NO: 3904 - RNA, 25 nt, Homo sapiens
  source 1..25: mol_type = unassigned RNA
gtccccacaccagcaggcaggcggc

SEQ ID NO: 3905 - RNA, 25 nt, Homo sapiens
  source 1..25: mol_type = unassigned RNA
ccgggtccccacaccagcaggcagg

SEQ ID NO: 3906 - RNA, 25 nt, Homo sapiens
  source 1..25: mol_type = unassigned RNA
agaccgggtccccacaccagcaggc

SEQ ID NO: 3907 - RNA, 25 nt, Homo sapiens
  source 1..25: mol_type = unassigned RNA
ggaaagaccgggtccccacaccagc

SEQ ID NO: 3908 - RNA, 25 nt, Homo sapiens
  source 1..25: mol_type = unassigned RNA
gtccacttggcagtgaggaaagacc

SEQ ID NO: 3909 - RNA, 25 nt, Homo sapiens
  source 1..25: mol_type = unassigned RNA
agtccacttggcagtgaggaaagac

SEQ ID NO: 3910 - RNA, 25 nt, Homo sapiens
  source 1..25: mol_type = unassigned RNA
cccaggaggagtccacttggcagtg

SEQ ID NO: 3911 - RNA, 25 nt, Homo sapiens
  source 1..25: mol_type = unassigned RNA
gggcctcccccaggaggagtccact

SEQ ID NO: 3912 - RNA, 25 nt, Homo sapiens
  source 1..25: mol_type = unassigned RNA
ccaggaggtcagggcctcccccagg

SEQ ID NO: 3913 - RNA, 25 nt, Homo sapiens
  source 1..25: mol_type = unassigned RNA
tcaccaggaggtcagggcctccccc

SEQ ID NO: 3914 - RNA, 25 nt, Homo sapiens
  source 1..25: mol_type = unassigned RNA
attgtctccagtcaccaggaggtca

SEQ ID NO: 3915 - RNA, 25 nt, Homo sapiens
  source 1..25: mol_type = unassigned RNA
cattgtctccagtcaccaggaggtc

SEQ ID NO: 3916 - RNA, 25 nt, Homo sapiens
  source 1..25: mol_type = unassigned RNA
gtcgccattgtctccagtcaccagg

SEQ ID NO: 3917 - RNA, 25 nt, Homo sapiens
  source 1..25: mol_type = unassigned RNA
aaagtcgccattgtctccagtcacc

SEQ ID NO: 3918 - RNA, 25 nt, Homo sapiens
  source 1..25: mol_type = unassigned RNA
gcctggctcacatcctctagtcgaa

SEQ ID NO: 3919 - RNA, 25 nt, Homo sapiens
  source 1..25: mol_type = unassigned RNA
ggcctggctcacatcctctagtcga

SEQ ID NO: 3920 - RNA, 25 nt, Homo sapiens
  source 1..25: mol_type = unassigned RNA
gcaggtgtaggtcccagcctgggcc

SEQ ID NO: 3921 - RNA, 25 nt, Homo sapiens
  source 1..25: mol_type = unassigned RNA
atatggcaggtgtaggtcccagcct

SEQ ID NO: 3922 - RNA, 25 nt, Homo sapiens
  source 1..25: mol_type = unassigned RNA
gatatggcaggtgtaggtcccagcc

SEQ ID NO: 3923 - RNA, 25 nt, Homo sapiens
  source 1..25: mol_type = unassigned RNA
tcctgcagatggatatggcaggtgt

SEQ ID NO: 3924 - RNA, 25 nt, Homo sapiens
  source 1..25: mol_type = unassigned RNA
tgctgttcctgcagatggatatggc

SEQ ID NO: 3925 - RNA, 25 nt, Homo sapiens
  source 1..25: mol_type = unassigned RNA
gagctgctgttcctgcagatggata

SEQ ID NO: 3926 - RNA, 25 nt, Homo sapiens
  source 1..25: mol_type = unassigned RNA
ggcattgagctgctgttcctgcaga

SEQ ID NO: 3927 - RNA, 25 nt, Homo sapiens
  source 1..25: mol_type = unassigned RNA
cctgtgatgattgccaatgtgacag

SEQ ID NO: 3928 - RNA, 25 nt, Homo sapiens
  source 1..25: mol_type = unassigned RNA
tcttttcagtgactcccaaatcctt

SEQ ID NO: 3929 - RNA, 25 nt, Homo sapiens
  source 1..25: mol_type = unassigned RNA
cttttcagtgactcccaaatccttt

SEQ ID NO: 3930 - RNA, 25 nt, Homo sapiens
  source 1..25: mol_type = unassigned RNA
tgactcccaaatcctttgggtcacc

SEQ ID NO: 3931 - RNA, 25 nt, Homo sapiens
  source 1..25: mol_type = unassigned RNA
aaatcctttgggtcacctggatccc

SEQ ID NO: 3932 - RNA, 25 nt, Homo sapiens
  source 1..25: mol_type = unassigned RNA
aatcctttgggtcacctggatccct

SEQ ID NO: 3933 - RNA, 25 nt, Homo sapiens
  source 1..25: mol_type = unassigned RNA
atcctttgggtcacctggatccctg

SEQ ID NO: 3934 - RNA, 25 nt, Homo sapiens
  source 1..25: mol_type = unassigned RNA
ggatccctggggaagctgctttgtg

SEQ ID NO: 3935 - RNA, 25 nt, Homo sapiens
  source 1..25: mol_type = unassigned RNA
tgctttgtgaggtgactccagtatc

SEQ ID NO: 3936 - RNA, 25 nt, Homo sapiens
  source 1..25: mol_type = unassigned RNA
agtatctggacaagaacgctttgtg

SEQ ID NO: 3937 - RNA, 25 nt, Homo sapiens
  source 1..25: mol_type = unassigned RNA
caagaacgctttgtgtggagctctc

SEQ ID NO: 3938 - RNA, 25 nt, Homo sapiens
  source 1..25: mol_type = unassigned RNA
gagctctctggacaccccatcccag

SEQ ID NO: 3939 - RNA, 25 nt, Homo sapiens
  source 1..25: mol_type = unassigned RNA
acaccccatcccagaggagtttctc

SEQ ID NO: 3940 - RNA, 25 nt, Homo sapiens
  source 1..25: mol_type = unassigned RNA
atcccagaggagtttctcaggacct

SEQ ID NO: 3941 - RNA, 25 nt, Homo sapiens
  source 1..25: mol_type = unassigned RNA
cagaggagtttctcaggaccttggc

SEQ ID NO: 3942 - RNA, 25 nt, Homo sapiens
  source 1..25: mol_type = unassigned RNA
aggagtttctcaggaccttggctgg

SEQ ID NO: 3943 - RNA, 25 nt, Homo sapiens
  source 1..25: mol_type = unassigned RNA
ttctcaggaccttggctggaggcac

SEQ ID NO: 3944 - RNA, 25 nt, Homo sapiens
  source 1..25: mol_type = unassigned RNA
tcaggaccttggctggaggcacagg

SEQ ID NO: 3945 - RNA, 25 nt, Homo sapiens
  source 1..25: mol_type = unassigned RNA
ggaggcccagctcctttcccagcct

SEQ ID NO: 3946 - RNA, 25 nt, Homo sapiens
  source 1..25: mol_type = unassigned RNA
cagccttggcaatgccagctgtacc

SEQ ID NO: 3947 - RNA, 25 nt, Homo sapiens
  source 1..25: mol_type = unassigned RNA
agccttggcaatgccagctgtacca

SEQ ID NO: 3948 - RNA, 25 nt, Homo sapiens
  source 1..25: mol_type = unassigned RNA
gccttggcaatgccagctgtaccag

SEQ ID NO: 3949 - RNA, 25 nt, Homo sapiens
  source 1..25: mol_type = unassigned RNA
ccttggcaatgccagctgtaccagg

SEQ ID NO: 3950 - RNA, 25 nt, Homo sapiens
  source 1..25: mol_type = unassigned RNA
gcaatgccagctgtaccagggggag

SEQ ID NO: 3951 - RNA, 25 nt, Homo sapiens
  source 1..25: mol_type = unassigned RNA
agctgtaccagggggagaggcttct

SEQ ID NO: 3952 - RNA, 25 nt, Homo sapiens
  source 1..25: mol_type = unassigned RNA
tgtacttcacagagctgtctagccc

SEQ ID NO: 3953 - RNA, 25 nt, Homo sapiens
  source 1..25: mol_type = unassigned RNA
cacagagctgtctagcccaggtccg

SEQ ID NO: 3954 - RNA, 25 nt, Homo sapiens
  source 1..25: mol_type = unassigned RNA
cccaggtccgaggccccagaatgcc

SEQ ID NO: 3955 - RNA, 25 nt, Homo sapiens
  source 1..25: mol_type = unassigned RNA
tttgggagtcactgaaaagagtaga

SEQ ID NO: 3956 - RNA, 25 nt, Homo sapiens
  source 1..25: mol_type = unassigned RNA
gggatccaggtgacccaaaggattt

SEQ ID NO: 3957 - RNA, 25 nt, Homo sapiens
  source 1..25: mol_type = unassigned RNA
agggatccaggtgacccaaaggatt

SEQ ID NO: 3958 - RNA, 25 nt, Homo sapiens
  source 1..25: mol_type = unassigned RNA
ttccccagggatccaggtgacccaa

SEQ ID NO: 3959 - RNA, 25 nt, Homo sapiens
  source 1..25: mol_type = unassigned RNA
cacaaagcagcttccccagggatcc

SEQ ID NO: 3960 - RNA, 25 nt, Homo sapiens
  source 1..25: mol_type = unassigned RNA
gtcacctcacaaagcagcttcccca

SEQ ID NO: 3961 - RNA, 25 nt, Homo sapiens
  source 1..25: mol_type = unassigned RNA
agtcacctcacaaagcagcttcccc

SEQ ID NO: 3962 - RNA, 25 nt, Homo sapiens
  source 1..25: mol_type = unassigned RNA
acacaaagcgttcttgtccagatac

SEQ ID NO: 3963 - RNA, 25 nt, Homo sapiens
  source 1..25: mol_type = unassigned RNA
ggtcctgagaaactcctctgggatg

SEQ ID NO: 3964 - RNA, 25 nt, Homo sapiens
  source 1..25: mol_type = unassigned RNA
aggtcctgagaaactcctctgggat

SEQ ID NO: 3965 - RNA, 25 nt, Homo sapiens
  source 1..25: mol_type = unassigned RNA
aaggtcctgagaaactcctctggga

SEQ ID NO: 3966 - RNA, 25 nt, Homo sapiens
  source 1..25: mol_type = unassigned RNA
agccaaggtcctgagaaactcctct

SEQ ID NO: 3967 - RNA, 25 nt, Homo sapiens
  source 1..25: mol_type = unassigned RNA
cagccaaggtcctgagaaactcctc

SEQ ID NO: 3968 - RNA, 25 nt, Homo sapiens
  source 1..25: mol_type = unassigned RNA
gctgggcctcctgtgcctccagcca

SEQ ID NO: 3969 - RNA, 25 nt, Homo sapiens
  source 1..25: mol_type = unassigned RNA
cattgccaaggctgggaaaggagct

SEQ ID NO: 3970 - RNA, 25 nt, Homo sapiens
  source 1..25: mol_type = unassigned RNA
gcattgccaaggctgggaaaggagc

SEQ ID NO: 3971 - RNA, 25 nt, Homo sapiens
  source 1..25: mol_type = unassigned RNA
cagctggcattgccaaggctgggaa

SEQ ID NO: 3972 - RNA, 25 nt, Homo sapiens
  source 1..25: mol_type = unassigned RNA
tggtacagctggcattgccaaggct

SEQ ID NO: 3973 - RNA, 25 nt, Homo sapiens
  source 1..25: mol_type = unassigned RNA
ctggtacagctggcattgccaaggc

SEQ ID NO: 3974 - RNA, 25 nt, Homo sapiens
  source 1..25: mol_type = unassigned RNA
ccccctggtacagctggcattgcca

SEQ ID NO: 3975 - RNA, 25 nt, Homo sapiens
  source 1..25: mol_type = unassigned RNA
aagaagcctctccccctggtacagc

SEQ ID NO: 3976 - RNA, 25 nt, Homo sapiens
  source 1..25: mol_type = unassigned RNA
tgctgctccaagaagcctctccccc

SEQ ID NO: 3977 - RNA, 25 nt, Homo sapiens
  source 1..25: mol_type = unassigned RNA
cctggcattctggggcctcggacct

SEQ ID NO: 3978 - RNA, 25 nt, Homo sapiens
  source 1..25: mol_type = unassigned RNA
tcctggcattctggggcctcggacc

SEQ ID NO: 3979 - RNA, 25 nt, Homo sapiens
  source 1..25: mol_type = unassigned RNA
ctttctccataggtgcccaacgctc

SEQ ID NO: 3980 - RNA, 25 nt, Homo sapiens
  source 1..25: mol_type = unassigned RNA
tttctccataggtgcccaacgctct

SEQ ID NO: 3981 - RNA, 25 nt, Homo sapiens
  source 1..25: mol_type = unassigned RNA
gtgcccaacgctctgggagagcccc

SEQ ID NO: 3982 - RNA, 25 nt, Homo sapiens
  source 1..25: mol_type = unassigned RNA
ggagagccccaggtgccctcccagc

SEQ ID NO: 3983 - RNA, 25 nt, Homo sapiens
  source 1..25: mol_type = unassigned RNA
gccacctcctgctgtttctcatcct

SEQ ID NO: 3984 - RNA, 25 nt, Homo sapiens
  source 1..25: mol_type = unassigned RNA
cttggtgtcctttctctgctccttt

SEQ ID NO: 3985 - RNA, 25 nt, Homo sapiens
  source 1..25: mol_type = unassigned RNA
tcctttctctgctccttttggtgac

SEQ ID NO: 3986 - RNA, 25 nt, Homo sapiens
  source 1..25: mol_type = unassigned RNA
tgctccttttggtgactggagcctt

SEQ ID NO: 3987 - RNA, 25 nt, Homo sapiens
  source 1..25: mol_type = unassigned RNA
gactggagcctttggctttcacctt

SEQ ID NO: 3988 - RNA, 25 nt, Homo sapiens
  source 1..25: mol_type = unassigned RNA
tttggctttcacctttggagaagac

SEQ ID NO: 3989 - RNA, 25 nt, Homo sapiens
  source 1..25: mol_type = unassigned RNA
cacctttggagaagacaggtgagcc

SEQ ID NO: 3990 - RNA, 25 nt, Homo sapiens
  source 1..25: mol_type = unassigned RNA
acctttggagaagacaggtgagcca

SEQ ID NO: 3991 - RNA, 25 nt, Homo sapiens
  source 1..25: mol_type = unassigned RNA
ggagaagacaggtgagccagggaca

SEQ ID NO: 3992 - RNA, 25 nt, Homo sapiens
  source 1..25: mol_type = unassigned RNA
cgttgggcacctatggagaaagtac

SEQ ID NO: 3993 - RNA, 25 nt, Homo sapiens
  source 1..25: mol_type = unassigned RNA
gctctcccagagcgttgggcaccta

SEQ ID NO: 3994 - RNA, 25 nt, Homo sapiens
  source 1..25: mol_type = unassigned RNA
gcacctggggctctcccagagcgtt

SEQ ID NO: 3995 - RNA, 25 nt, Homo sapiens
  source 1..25: mol_type = unassigned RNA
ggcacctggggctctcccagagcgt

SEQ ID NO: 3996 - RNA, 25 nt, Homo sapiens
  source 1..25: mol_type = unassigned RNA
aggtggcctgctgggagggcacctg

SEQ ID NO: 3997 - RNA, 25 nt, Homo sapiens
  source 1..25: mol_type = unassigned RNA
gaggtggcctgctgggagggcacct

SEQ ID NO: 3998 - RNA, 25 nt, Homo sapiens
  source 1..25: mol_type = unassigned RNA
ggaggtggcctgctgggagggcacc

SEQ ID NO: 3999 - RNA, 25 nt, Homo sapiens
  source 1..25: mol_type = unassigned RNA
aacagcaggaggtggcctgctggga

SEQ ID NO: 4000 - RNA, 25 nt, Homo sapiens
  source 1..25: mol_type = unassigned RNA
aaacagcaggaggtggcctgctggg

SEQ ID NO: 4001 - RNA, 25 nt, Homo sapiens
  source 1..25: mol_type = unassigned RNA
gagaaacagcaggaggtggcctgct

SEQ ID NO: 4002 - RNA, 25 nt, Homo sapiens
  source 1..25: mol_type = unassigned RNA
tgagaaacagcaggaggtggcctgc

SEQ ID NO: 4003 - RNA, 25 nt, Homo sapiens
  source 1..25: mol_type = unassigned RNA
accaaggatgagaaacagcaggagg

SEQ ID NO: 4004 - RNA, 25 nt, Homo sapiens
  source 1..25: mol_type = unassigned RNA
gacaccaaggatgagaaacagcagg

SEQ ID NO: 4005 - RNA, 25 nt, Homo sapiens
  source 1..25: mol_type = unassigned RNA
aaggacaccaaggatgagaaacagc

SEQ ID NO: 4006 - RNA, 25 nt, Homo sapiens
  source 1..25: mol_type = unassigned RNA
caaaaggagcagagaaaggacacca

SEQ ID NO: 4007 - RNA, 25 nt, Homo sapiens
  source 1..25: mol_type = unassigned RNA
tccagtcaccaaaaggagcagagaa

SEQ ID NO: 4008 - RNA, 25 nt, Homo sapiens
  source 1..25: mol_type = unassigned RNA
aaagccaaaggctccagtcaccaaa

SEQ ID NO: 4009 - RNA, 25 nt, Homo sapiens
  source 1..25: mol_type = unassigned RNA
tgtcttctccaaaggtgaaagccaa

SEQ ID NO: 4010 - RNA, 25 nt, Homo sapiens
  source 1..25: mol_type = unassigned RNA
tccctggctcacctgtcttctccaa

SEQ ID NO: 4011 - RNA, 25 nt, Homo sapiens
  source 1..25: mol_type = unassigned RNA
tctctctctccatctcttctcacag

SEQ ID NO: 4012 - RNA, 25 nt, Homo sapiens
  source 1..25: mol_type = unassigned RNA
caagacgattttctgccttagagca

SEQ ID NO: 4013 - RNA, 25 nt, Homo sapiens
  source 1..25: mol_type = unassigned RNA
aagacgattttctgccttagagcaa

SEQ ID NO: 4014 - RNA, 25 nt, Homo sapiens
  source 1..25: mol_type = unassigned RNA
ttagagcaagggattcaccctccgc

SEQ ID NO: 4015 - RNA, 25 nt, Homo sapiens
  source 1..25: mol_type = unassigned RNA
cctccgcaggctcagagcaagatag

SEQ ID NO: 4016 - RNA, 25 nt, Homo sapiens
  source 1..25: mol_type = unassigned RNA
caggctcagagcaagatagaggagc

SEQ ID NO: 4017 - RNA, 25 nt, Homo sapiens
  source 1..25: mol_type = unassigned RNA
agcccgagccggagcagctctgacc

SEQ ID NO: 4018 - RNA, 25 nt, Homo sapiens
  source 1..25: mol_type = unassigned RNA
ccggagcagctctgacctggagctg

SEQ ID NO: 4019 - RNA, 25 nt, Homo sapiens
  source 1..25: mol_type = unassigned RNA
tccctgtcagcagcaagcctgagtc

SEQ ID NO: 4020 - RNA, 25 nt, Homo sapiens
  source 1..25: mol_type = unassigned RNA
tcttggtcgccactgtgagaagaga

SEQ ID NO: 4021 - RNA, 25 nt, Homo sapiens
  source 1..25: mol_type = unassigned RNA
cttgctctaaggcagaaaatcgtct

SEQ ID NO: 4022 - RNA, 25 nt, Homo sapiens
  source 1..25: mol_type = unassigned RNA
tgcggagggtgaatcccttgctcta

SEQ ID NO: 4023 - RNA, 25 nt, Homo sapiens
  source 1..25: mol_type = unassigned RNA
ctctatcttgctctgagcctgcgga

SEQ ID NO: 4024 - RNA, 25 nt, Homo sapiens
  source 1..25: mol_type = unassigned RNA
cctctatcttgctctgagcctgcgg

SEQ ID NO: 4025 - RNA, 25 nt, Homo sapiens
  source 1..25: mol_type = unassigned RNA
gctcctctatcttgctctgagcctg

SEQ ID NO: 4026 - RNA, 25 nt, Homo sapiens
  source 1..25: mol_type = unassigned RNA
gagatctgctggctgcctcagctcc

SEQ ID NO: 4027 - RNA, 25 nt, Homo sapiens
  source 1..25: mol_type = unassigned RNA
tttggactgggctgctgagatctgc

SEQ ID NO: 4028 - RNA, 25 nt, Homo sapiens
  source 1..25: mol_type = unassigned RNA
tgctgacagggagtttatttggact

SEQ ID NO: 4029 - RNA, 25 nt, Homo sapiens
  source 1..25: mol_type = unassigned RNA
ctgctgacagggagtttatttggac

SEQ ID NO: 4030 - RNA, 25 nt, Homo sapiens
  source 1..25: mol_type = unassigned RNA
gcttgctgctgacagggagtttatt

SEQ ID NO: 4031 - RNA, 25 nt, Homo sapiens
  source 1..25: mol_type = unassigned RNA
gccagactcaggcttgctgctgaca

SEQ ID NO: 4032 - RNA, 25 nt, Homo sapiens
  source 1..25: mol_type = unassigned RNA
agccagactcaggcttgctgctgac

SEQ ID NO: 4033 - RNA, 25 nt, Homo sapiens
  source 1..25: mol_type = unassigned RNA
tataattataatataatagaaccac

SEQ ID NO: 4034 - RNA, 25 nt, Homo sapiens
  source 1..25: mol_type = unassigned RNA
ataattataatataatagaaccaca

SEQ ID NO: 4035 - RNA, 25 nt, Homo sapiens
  source 1..25: mol_type = unassigned RNA
ttataatataatagaaccacaggga

SEQ ID NO: 4036 - RNA, 25 nt, Homo sapiens
  source 1..25: mol_type = unassigned RNA
tataatataatagaaccacagggaa

SEQ ID NO: 4037 - RNA, 25 nt, Homo sapiens
  source 1..25: mol_type = unassigned RNA
ataatataatagaaccacagggaag

SEQ ID NO: 4038 - RNA, 25 nt, Homo sapiens
  source 1..25: mol_type = unassigned RNA
taatataatagaaccacagggaagg

SEQ ID NO: 4039 - RNA, 25 nt, Homo sapiens
  source 1..25: mol_type = unassigned RNA
gggggatcccttgtcccagccactc

SEQ ID NO: 4040 - RNA, 25 nt, Homo sapiens
  source 1..25: mol_type = unassigned RNA
ttgtcccagccactcaggtgcctgc

SEQ ID NO: 4041 - RNA, 25 nt, Homo sapiens
  source 1..25: mol_type = unassigned RNA
gccactcaggtgcctgctggccgcc

SEQ ID NO: 4042 - RNA, 25 nt, Homo sapiens
  source 1..25: mol_type = unassigned RNA
aggtgcctgctggccgcctggatgc

SEQ ID NO: 4043 - RNA, 25 nt, Homo sapiens
  source 1..25: mol_type = unassigned RNA
tgcctgctggccgcctggatgctgg

SEQ ID NO: 4044 - RNA, 25 nt, Homo sapiens
  source 1..25: mol_type = unassigned RNA
gcctggatgctggtggccctgcccc

SEQ ID NO: 4045 - RNA, 25 nt, Homo sapiens
  source 1..25: mol_type = unassigned RNA
gatgctggtggccctgccccaggag

SEQ ID NO: 4046 - RNA, 25 nt, Homo sapiens
  source 1..25: mol_type = unassigned RNA
atgctggtggccctgccccaggagt

SEQ ID NO: 4047 - RNA, 25 nt, Homo sapiens
  source 1..25: mol_type = unassigned RNA
tgctggtggccctgccccaggagtg

SEQ ID NO: 4048 - RNA, 25 nt, Homo sapiens
  source 1..25: mol_type = unassigned RNA
gctggtggccctgccccaggagtgg

SEQ ID NO: 4049 - RNA, 25 nt, Homo sapiens
  source 1..25: mol_type = unassigned RNA
gccccaggagtgggggtgcagtgtg

SEQ ID NO: 4050 - RNA, 25 nt, Homo sapiens
  source 1..25: mol_type = unassigned RNA
agtgggggtgcagtgtgtggatgtg

SEQ ID NO: 4051 - RNA, 25 nt, Homo sapiens
  source 1..25: mol_type = unassigned RNA
gggtgcagtgtgtggatgtgaggag

SEQ ID NO: 4052 - RNA, 25 nt, Homo sapiens
  source 1..25: mol_type = unassigned RNA
cagtgtgtggatgtgaggagtggat

SEQ ID NO: 4053 - RNA, 25 nt, Homo sapiens
  source 1..25: mol_type = unassigned RNA
gtggatgtgaggagtggataggcca

SEQ ID NO: 4054 - RNA, 25 nt, Homo sapiens
  source 1..25: mol_type = unassigned RNA
gatgtgaggagtggataggccacgg

SEQ ID NO: 4055 - RNA, 25 nt, Homo sapiens
  source 1..25: mol_type = unassigned RNA
atgtgaggagtggataggccacggc

SEQ ID NO: 4056 - RNA, 25 nt, Homo sapiens
  source 1..25: mol_type = unassigned RNA
tgtgaggagtggataggccacggcg

SEQ ID NO: 4057 - RNA, 25 nt, Homo sapiens
  source 1..25: mol_type = unassigned RNA
gtgaggagtggataggccacggcgg

SEQ ID NO: 4058 - RNA, 25 nt, Homo sapiens
  source 1..25: mol_type = unassigned RNA
gtggataggccacggcgggggtact

SEQ ID NO: 4059 - RNA, 25 nt, Homo sapiens
  source 1..25: mol_type = unassigned RNA
aggccacggcgggggtactaggccc

SEQ ID NO: 4060 - RNA, 25 nt, Homo sapiens
  source 1..25: mol_type = unassigned RNA
ggccacggcgggggtactaggcccc

SEQ ID NO: 4061 - RNA, 25 nt, Homo sapiens
  source 1..25: mol_type = unassigned RNA
gccacggcgggggtactaggccccg

SEQ ID NO: 4062 - RNA, 25 nt, Homo sapiens
  source 1..25: mol_type = unassigned RNA
ccacggcgggggtactaggccccgg

SEQ ID NO: 4063 - RNA, 25 nt, Homo sapiens
  source 1..25: mol_type = unassigned RNA
ggggaacgcctgtaccttcccaccc

SEQ ID NO: 4064 - RNA, 25 nt, Homo sapiens
  source 1..25: mol_type = unassigned RNA
cgcctgtaccttcccacccaggccc

SEQ ID NO: 4065 - RNA, 25 nt, Homo sapiens
  source 1..25: mol_type = unassigned RNA
ctgtaccttcccacccaggccctgg

SEQ ID NO: 4066 - RNA, 25 nt, Homo sapiens
  source 1..25: mol_type = unassigned RNA
tgtaccttcccacccaggccctggt

SEQ ID NO: 4067 - RNA, 25 nt, Homo sapiens
  source 1..25: mol_type = unassigned RNA
tcccacccaggccctggtgggagcc

SEQ ID NO: 4068 - RNA, 25 nt, Homo sapiens
  source 1..25: mol_type = unassigned RNA
ccggccaacccctttaaataatttc

SEQ ID NO: 4069 - RNA, 25 nt, Homo sapiens
  source 1..25: mol_type = unassigned RNA
caacccctttaaataatttcaggaa

SEQ ID NO: 4070 - RNA, 25 nt, Homo sapiens
  source 1..25: mol_type = unassigned RNA
aacccctttaaataatttcaggaat

SEQ ID NO: 4071 - RNA, 25 nt, Homo sapiens
  source 1..25: mol_type = unassigned RNA
taaataatttcaggaatgggttcca

SEQ ID NO: 4072 - RNA, 25 nt, Homo sapiens
  source 1..25: mol_type = unassigned RNA
ggaatgggttccaaggagagctccc

SEQ ID NO: 4073 - RNA, 25 nt, Homo sapiens
  source 1..25: mol_type = unassigned RNA
gaatgggttccaaggagagctccca

SEQ ID NO: 4074 - RNA, 25 nt, Homo sapiens
  source 1..25: mol_type = unassigned RNA
tgggttccaaggagagctcccaggg

SEQ ID NO: 4075 - RNA, 25 nt, Homo sapiens
  source 1..25: mol_type = unassigned RNA
gggttccaaggagagctcccagggt

SEQ ID NO: 4076 - RNA, 25 nt, Homo sapiens
  source 1..25: mol_type = unassigned RNA
aaggagagctcccagggtgggcaca

SEQ ID NO: 4077 - RNA, 25 nt, Homo sapiens
  source 1..25: mol_type = unassigned RNA
aggagagctcccagggtgggcacat

SEQ ID NO: 4078 - RNA, 25 nt, Homo sapiens
  source 1..25: mol_type = unassigned RNA
ggagagctcccagggtgggcacatg

SEQ ID NO: 4079 - RNA, 25 nt, Homo sapiens
  source 1..25: mol_type = unassigned RNA
gagagctcccagggtgggcacatgg

SEQ ID NO: 4080 - RNA, 25 nt, Homo sapiens
  source 1..25: mol_type = unassigned RNA
agagctcccagggtgggcacatggg

SEQ ID NO: 4081 - RNA, 25 nt, Homo sapiens
  source 1..25: mol_type = unassigned RNA
ccagggtgggcacatggggggccct

SEQ ID NO: 4082 - RNA, 25 nt, Homo sapiens
  source 1..25: mol_type = unassigned RNA
ctgcacttctgccctcccaacaccc

SEQ ID NO: 4083 - RNA, 25 nt, Homo sapiens
  source 1..25: mol_type = unassigned RNA
cacttctgccctcccaacacccagg

SEQ ID NO: 4084 - RNA, 25 nt, Homo sapiens
  source 1..25: mol_type = unassigned RNA
ctcccaacacccaggtggccacagc

SEQ ID NO: 4085 - RNA, 25 nt, Homo sapiens
  source 1..25: mol_type = unassigned RNA
tcccaacacccaggtggccacagct

SEQ ID NO: 4086 - RNA, 25 nt, Homo sapiens
  source 1..25: mol_type = unassigned RNA
caacacccaggtggccacagctggg

SEQ ID NO: 4087 - RNA, 25 nt, Homo sapiens
  source 1..25: mol_type = unassigned RNA
aacacccaggtggccacagctggga

SEQ ID NO: 4088 - RNA, 25 nt, Homo sapiens
  source 1..25: mol_type = unassigned RNA
acacccaggtggccacagctgggag

SEQ ID NO: 4089 - RNA, 25 nt, Homo sapiens
  source 1..25: mol_type = unassigned RNA
aaccccagccctgccctcctgacct

SEQ ID NO: 4090 - RNA, 25 nt, Homo sapiens
  source 1..25: mol_type = unassigned RNA
accccagccctgccctcctgacctt

SEQ ID NO: 4091 - RNA, 25 nt, Homo sapiens
  source 1..25: mol_type = unassigned RNA
cctgccctcctgaccttgggaccgt

SEQ ID NO: 4092 - RNA, 25 nt, Homo sapiens
  source 1..25: mol_type = unassigned RNA
gaccgtaggatgtccctctcccgag

SEQ ID NO: 4093 - RNA, 25 nt, Homo sapiens
  source 1..25: mol_type = unassigned RNA
ggatgtccctctcccgagtggtgtg

SEQ ID NO: 4094 - RNA, 25 nt, Homo sapiens
  source 1..25: mol_type = unassigned RNA
gatgtccctctcccgagtggtgtga

SEQ ID NO: 4095 - RNA, 25 nt, Homo sapiens
  source 1..25: mol_type = unassigned RNA
atgtccctctcccgagtggtgtgag

SEQ ID NO: 4096 - RNA, 25 nt, Homo sapiens
  source 1..25: mol_type = unassigned RNA
ccctctcccgagtggtgtgaggggc

SEQ ID NO: 4097 - RNA, 25 nt, Homo sapiens
  source 1..25: mol_type = unassigned RNA
cctctcccgagtggtgtgaggggct

SEQ ID NO: 4098 - RNA, 25 nt, Homo sapiens
  source 1..25: mol_type = unassigned RNA
ctctcccgagtggtgtgaggggctg

SEQ ID NO: 4099 - RNA, 25 nt, Homo sapiens
  source 1..25: mol_type = unassigned RNA
tcccgagtggtgtgaggggctgggg

SEQ ID NO: 4100 - RNA, 25 nt, Homo sapiens
  source 1..25: mol_type = unassigned RNA
tggtgtgaggggctggggtggaatg

SEQ ID NO: 4101 - RNA, 25 nt, Homo sapiens
  source 1..25: mol_type = unassigned RNA
tgtgaggggctggggtggaatgcgg

SEQ ID NO: 4102 - RNA, 25 nt, Homo sapiens
  source 1..25: mol_type = unassigned RNA
aggggctggggtggaatgcggcggc

SEQ ID NO: 4103 - RNA, 25 nt, Homo sapiens
  source 1..25: mol_type = unassigned RNA
ggctggggtggaatgcggcggcagg

SEQ ID NO: 4104 - RNA, 25 nt, Homo sapiens
  source 1..25: mol_type = unassigned RNA
atgcggcggcaggaggccagagtgc

SEQ ID NO: 4105 - RNA, 25 nt, Homo sapiens
  source 1..25: mol_type = unassigned RNA
ggcggcaggaggccagagtgctggc

SEQ ID NO: 4106 - RNA, 25 nt, Homo sapiens
  source 1..25: mol_type = unassigned RNA
gcggcaggaggccagagtgctggct

SEQ ID NO: 4107 - RNA, 25 nt, Homo sapiens
  source 1..25: mol_type = unassigned RNA
ggccagagtgctggctgggcctgaa

SEQ ID NO: 4108 - RNA, 25 nt, Homo sapiens
  source 1..25: mol_type = unassigned RNA
ctgcctcagcttccctgccccacaa

SEQ ID NO: 4109 - RNA, 25 nt, Homo sapiens
  source 1..25: mol_type = unassigned RNA
tgcctcagcttccctgccccacaaa

SEQ ID NO: 4110 - RNA, 25 nt, Homo sapiens
  source 1..25: mol_type = unassigned RNA
gcttccctgccccacaaagggcctg

SEQ ID NO: 4111 - RNA, 25 nt, Homo sapiens
  source 1..25: mol_type = unassigned RNA
cccacaaagggcctgaggtgctgcc

SEQ ID NO: 4112 - RNA, 25 nt, Homo sapiens
  source 1..25: mol_type = unassigned RNA
ccacaaagggcctgaggtgctgcct

SEQ ID NO: 4113 - RNA, 25 nt, Homo sapiens
  source 1..25: mol_type = unassigned RNA
tgaggtgctgcctgggcatgtgtaa

SEQ ID NO: 4114 - RNA, 25 nt, Homo sapiens
  source 1..25: mol_type = unassigned RNA
ggtgctgcctgggcatgtgtaaagg

SEQ ID NO: 4115 - RNA, 25 nt, Homo sapiens
  source 1..25: mol_type = unassigned RNA
gctgcctgggcatgtgtaaaggtgg

SEQ ID NO: 4116 - RNA, 25 nt, Homo sapiens
  source 1..25: mol_type = unassigned RNA
ctgcctgggcatgtgtaaaggtgga

SEQ ID NO: 4117 - RNA, 25 nt, Homo sapiens
  source 1..25: mol_type = unassigned RNA
tgcctgggcatgtgtaaaggtggag

SEQ ID NO: 4118 - RNA, 25 nt, Homo sapiens
  source 1..25: mol_type = unassigned RNA
gtttcctgccctgcccaccacagcc

SEQ ID NO: 4119 - RNA, 25 nt, Homo sapiens
  source 1..25: mol_type = unassigned RNA
ttctgaccttccctgaaacttctct

SEQ ID NO: 4120 - RNA, 25 nt, Homo sapiens
  source 1..25: mol_type = unassigned RNA
ttccctgaaacttctctaggcctgc

SEQ ID NO: 4121 - RNA, 25 nt, Homo sapiens
  source 1..25: mol_type = unassigned RNA
tccctgaaacttctctaggcctgca

SEQ ID NO: 4122 - RNA, 25 nt, Homo sapiens
  source 1..25: mol_type = unassigned RNA
aggcctgcagggagcagataactcc

SEQ ID NO: 4123 - RNA, 25 nt, Homo sapiens
  source 1..25: mol_type = unassigned RNA
ggcctgcagggagcagataactcct

SEQ ID NO: 4124 - RNA, 25 nt, Homo sapiens
  source 1..25: mol_type = unassigned RNA
gcctgcagggagcagataactcctg

SEQ ID NO: 4125 - RNA, 25 nt, Homo sapiens
  source 1..25: mol_type = unassigned RNA
tacctcccactcctgtgcccagtct

SEQ ID NO: 4126 - RNA, 25 nt, Homo sapiens
  source 1..25: mol_type = unassigned RNA
acctcccactcctgtgcccagtctt

SEQ ID NO: 4127 - RNA, 25 nt, Homo sapiens
  source 1..25: mol_type = unassigned RNA
gtgcccagtcttgggccctgcgtcc

SEQ ID NO: 4128 - RNA, 25 nt, Homo sapiens
  source 1..25: mol_type = unassigned RNA
tgcccagtcttgggccctgcgtcca

SEQ ID NO: 4129 - RNA, 25 nt, Homo sapiens
  source 1..25: mol_type = unassigned RNA
cttgggccctgcgtccagggcgttt

SEQ ID NO: 4130 - RNA, 25 nt, Homo sapiens
  source 1..25: mol_type = unassigned RNA
ttgggccctgcgtccagggcgtttc

SEQ ID NO: 4131 - RNA, 25 nt, Homo sapiens
  source 1..25: mol_type = unassigned RNA
cagggcgtttcgggatgccactgcc

SEQ ID NO: 4132 - RNA, 25 nt, Homo sapiens
  source 1..25: mol_type = unassigned RNA
agggcgtttcgggatgccactgcca

SEQ ID NO: 4133 - RNA, 25 nt, Homo sapiens
  source 1..25: mol_type = unassigned RNA
gggcgtttcgggatgccactgccag

SEQ ID NO: 4134 - RNA, 25 nt, Homo sapiens
  source 1..25: mol_type = unassigned RNA
cgggatgccactgccaggggcacct

SEQ ID NO: 4135 - RNA, 25 nt, Homo sapiens
  source 1..25: mol_type = unassigned RNA
tgccaggggcaccttggctgctcca

SEQ ID NO: 4136 - RNA, 25 nt, Homo sapiens
  source 1..25: mol_type = unassigned RNA
ccatctccaaccagcccccaagttc

SEQ ID NO: 4137 - RNA, 25 nt, Homo sapiens
  source 1..25: mol_type = unassigned RNA
ctccaaccagcccccaagttcaggc

SEQ ID NO: 4138 - RNA, 25 nt, Homo sapiens
  source 1..25: mol_type = unassigned RNA
caaccagcccccaagttcaggcagg

SEQ ID NO: 4139 - RNA, 25 nt, Homo sapiens
  source 1..25: mol_type = unassigned RNA
gcccccaagttcaggcaggaggctc

SEQ ID NO: 4140 - RNA, 25 nt, Homo sapiens
  source 1..25: mol_type = unassigned RNA
cccccaagttcaggcaggaggctcc

SEQ ID NO: 4141 - RNA, 25 nt, Homo sapiens
  source 1..25: mol_type = unassigned RNA
ccccaagttcaggcaggaggctccg

SEQ ID NO: 4142 - RNA, 25 nt, Homo sapiens
  source 1..25: mol_type = unassigned RNA
ttcaggcaggaggctccggggcgtc

SEQ ID NO: 4143 - RNA, 25 nt, Homo sapiens
  source 1..25: mol_type = unassigned RNA
ggcaggaggctccggggcgtcaggc

SEQ ID NO: 4144 - RNA, 25 nt, Homo sapiens
  source 1..25: mol_type = unassigned RNA
gcaggaggctccggggcgtcaggca

SEQ ID NO: 4145 - RNA, 25 nt, Homo sapiens
  source 1..25: mol_type = unassigned RNA
ggctccggggcgtcaggcagggcca

SEQ ID NO: 4146 - RNA, 25 nt, Homo sapiens
  source 1..25: mol_type = unassigned RNA
ggcagggccacggcgccttcagccc

SEQ ID NO: 4147 - RNA, 25 nt, Homo sapiens
  source 1..25: mol_type = unassigned RNA
gcagggccacggcgccttcagcccc

SEQ ID NO: 4148 - RNA, 25 nt, Homo sapiens
  source 1..25: mol_type = unassigned RNA
gcagcagcagcagcagcagagattc

SEQ ID NO: 4149 - RNA, 25 nt, Homo sapiens
  source 1..25: mol_type = unassigned RNA
cagcagcagcagcagcagagattca

SEQ ID NO: 4150 - RNA, 25 nt, Homo sapiens
  source 1..25: mol_type = unassigned RNA
cagcagcagcagagattcagggagc

SEQ ID NO: 4151 - RNA, 25 nt, Homo sapiens
  source 1..25: mol_type = unassigned RNA
agcagagattcagggagctggacgc

SEQ ID NO: 4152 - RNA, 25 nt, Homo sapiens
  source 1..25: mol_type = unassigned RNA
gagctggacgcaggcagctctgtgc

SEQ ID NO: 4153 - RNA, 25 nt, Homo sapiens
  source 1..25: mol_type = unassigned RNA
tggacgcaggcagctctgtgctggc

SEQ ID NO: 4154 - RNA, 25 nt, Homo sapiens
  source 1..25: mol_type = unassigned RNA
caggacctgaagcagtgactgcatc

SEQ ID NO: 4155 - RNA, 25 nt, Homo sapiens
  source 1..25: mol_type = unassigned RNA
agtgactgcatctggccctccctgt

SEQ ID NO: 4156 - RNA, 25 nt, Homo sapiens
  source 1..25: mol_type = unassigned RNA
gtgactgcatctggccctccctgta

SEQ ID NO: 4157 - RNA, 25 nt, Homo sapiens
  source 1..25: mol_type = unassigned RNA
tgactgcatctggccctccctgtag

SEQ ID NO: 4158 - RNA, 25 nt, Homo sapiens
  source 1..25: mol_type = unassigned RNA
tgcatctggccctccctgtagggga

SEQ ID NO: 4159 - RNA, 25 nt, Homo sapiens
  source 1..25: mol_type = unassigned RNA
gtaggggacggtgacacctgctgcc

SEQ ID NO: 4160 - RNA, 25 nt, Homo sapiens
  source 1..25: mol_type = unassigned RNA
taggggacggtgacacctgctgcct

SEQ ID NO: 4161 - RNA, 25 nt, Homo sapiens
  source 1..25: mol_type = unassigned RNA
tgacacctgctgcctgggctcactg

SEQ ID NO: 4162 - RNA, 25 nt, Homo sapiens
  source 1..25: mol_type = unassigned RNA
gacacctgctgcctgggctcactgt

SEQ ID NO: 4163 - RNA, 25 nt, Homo sapiens
  source 1..25: mol_type = unassigned RNA
tgtgggcattgagacatgagtcctg

SEQ ID NO: 4164 - RNA, 25 nt, Homo sapiens
  source 1..25: mol_type = unassigned RNA
gggcattgagacatgagtcctgtgg

SEQ ID NO: 4165 - RNA, 25 nt, Homo sapiens
  source 1..25: mol_type = unassigned RNA
ggcattgagacatgagtcctgtggt

SEQ ID NO: 4166 - RNA, 25 nt, Homo sapiens
  source 1..25: mol_type = unassigned RNA
gcattgagacatgagtcctgtggtg

SEQ ID NO: 4167 - RNA, 25 nt, Homo sapiens
  source 1..25: mol_type = unassigned RNA
atgagtcctgtggtggggctgtgcc

SEQ ID NO: 4168 - RNA, 25 nt, Homo sapiens
  source 1..25: mol_type = unassigned RNA
cctgtggtggggctgtgcctggtgc

SEQ ID NO: 4169 - RNA, 25 nt, Homo sapiens
  source 1..25: mol_type = unassigned RNA
gtggggctgtgcctggtgcaggtgc

SEQ ID NO: 4170 - RNA, 25 nt, Homo sapiens
  source 1..25: mol_type = unassigned RNA
ggctgtgcctggtgcaggtgcaggc

SEQ ID NO: 4171 - RNA, 25 nt, Homo sapiens
  source 1..25: mol_type = unassigned RNA
ctggtgcaggtgcaggctggagccc

SEQ ID NO: 4172 - RNA, 25 nt, Homo sapiens
  source 1..25: mol_type = unassigned RNA
gcaggctggagccccggtcgccccc

SEQ ID NO: 4173 - RNA, 25 nt, Homo sapiens
  source 1..25: mol_type = unassigned RNA
ggtcgcccccaggcagctcagcccc

SEQ ID NO: 4174 - RNA, 25 nt, Homo sapiens
  source 1..25: mol_type = unassigned RNA
gcccccaggcagctcagcccctgga

SEQ ID NO: 4175 - RNA, 25 nt, Homo sapiens
  source 1..25: mol_type = unassigned RNA
agctcagcccctggacggcctgcaa

SEQ ID NO: 4176 - RNA, 25 nt, Homo sapiens
  source 1..25: mol_type = unassigned RNA
gcctgcaccctgcctgcttctcctg

SEQ ID NO: 4177 - RNA, 25 nt, Homo sapiens
  source 1..25: mol_type = unassigned RNA
cttctcctgaggaaatgcgctgacc

SEQ ID NO: 4178 - RNA, 25 nt, Homo sapiens
  source 1..25: mol_type = unassigned RNA
ttctcctgaggaaatgcgctgaccc

SEQ ID NO: 4179 - RNA, 25 nt, Homo sapiens
  source 1..25: mol_type = unassigned RNA
gaggaaatgcgctgacccgggctca

SEQ ID NO: 4180 - RNA, 25 nt, Homo sapiens
  source 1..25: mol_type = unassigned RNA
gaaatgcgctgacccgggctcatgg

SEQ ID NO: 4181 - RNA, 25 nt, Homo sapiens
  source 1..25: mol_type = unassigned RNA
atgcgctgacccgggctcatggtgg

SEQ ID NO: 4182 - RNA, 25 nt, Homo sapiens
  source 1..25: mol_type = unassigned RNA
tgcgctgacccgggctcatggtgga

SEQ ID NO: 4183 - RNA, 25 nt, Homo sapiens
  source 1..25: mol_type = unassigned RNA
tcatggtggagggtctgcagaacac

SEQ ID NO: 4184 - RNA, 25 nt, Homo sapiens
  source 1..25: mol_type = unassigned RNA
tggtggagggtctgcagaacactgg

SEQ ID NO: 4185 - RNA, 25 nt, Homo sapiens
  source 1..25: mol_type = unassigned RNA
agggtctgcagaacactggtggcca

SEQ ID NO: 4186 - RNA, 25 nt, Homo sapiens
  source 1..25: mol_type = unassigned RNA
gcagaacactggtggccaaggaagc

SEQ ID NO: 4187 - RNA, 25 nt, Homo sapiens
  source 1..25: mol_type = unassigned RNA
actggtggccaaggaagccggtcag

SEQ ID NO: 4188 - RNA, 25 nt, Homo sapiens
  source 1..25: mol_type = unassigned RNA
ctggtggccaaggaagccggtcaga

SEQ ID NO: 4189 - RNA, 25 nt, Homo sapiens
  source 1..25: mol_type = unassigned RNA
tggtggccaaggaagccggtcagag

SEQ ID NO: 4190 - RNA, 25 nt, Homo sapiens
  source 1..25: mol_type = unassigned RNA
ggggccaagagcagtgtccatcctc

SEQ ID NO: 4191 - RNA, 25 nt, Homo sapiens
  source 1..25: mol_type = unassigned RNA
agcagtgtccatcctcaggcctcag

SEQ ID NO: 4192 - RNA, 25 nt, Homo sapiens
  source 1..25: mol_type = unassigned RNA
gtgtccatcctcaggcctcagtggc

SEQ ID NO: 4193 - RNA, 25 nt, Homo sapiens
  source 1..25: mol_type = unassigned RNA
tgtccatcctcaggcctcagtggct

SEQ ID NO: 4194 - RNA, 25 nt, Homo sapiens
  source 1..25: mol_type = unassigned RNA
caggcctcagtggctgggcactccg

SEQ ID NO: 4195 - RNA, 25 nt, Homo sapiens
  source 1..25: mol_type = unassigned RNA
aggcctcagtggctgggcactccga

SEQ ID NO: 4196 - RNA, 25 nt, Homo sapiens
  source 1..25: mol_type = unassigned RNA
ccgagggccgtcagctgagcccctg

SEQ ID NO: 4197 - RNA, 25 nt, Homo sapiens
  source 1..25: mol_type = unassigned RNA
cgagggccgtcagctgagcccctgc

SEQ ID NO: 4198 - RNA, 25 nt, Homo sapiens
  source 1..25: mol_type = unassigned RNA
gggccgtcagctgagcccctgcggg

SEQ ID NO: 4199 - RNA, 25 nt, Homo sapiens
  source 1..25: mol_type = unassigned RNA
ggccgtcagctgagcccctgcgggc

SEQ ID NO: 4200 - RNA, 25 nt, Homo sapiens
  source 1..25: mol_type = unassigned RNA
gccgtcagctgagcccctgcgggcg

SEQ ID NO: 4201 - RNA, 25 nt, Homo sapiens
  source 1..25: mol_type = unassigned RNA
ccgtcagctgagcccctgcgggcgg

SEQ ID NO: 4202 - RNA, 25 nt, Homo sapiens
  source 1..25: mol_type = unassigned RNA
gctgagcccctgcgggcgggggatg

SEQ ID NO: 4203 - RNA, 25 nt, Homo sapiens
  source 1..25: mol_type = unassigned RNA
cgggggatgaggtgcccattccgct

SEQ ID NO: 4204 - RNA, 25 nt, Homo sapiens
  source 1..25: mol_type = unassigned RNA
gtgcccattccgctaggaaagacaa

SEQ ID NO: 4205 - RNA, 25 nt, Homo sapiens
  source 1..25: mol_type = unassigned RNA
cccattccgctaggaaagacaatgg

SEQ ID NO: 4206 - RNA, 25 nt, Homo sapiens
  source 1..25: mol_type = unassigned RNA
caatggtggcatactccgtctgctc

SEQ ID NO: 4207 - RNA, 25 nt, Homo sapiens
  source 1..25: mol_type = unassigned RNA
aatggtggcatactccgtctgctca

SEQ ID NO: 4208 - RNA, 25 nt, Homo sapiens
  source 1..25: mol_type = unassigned RNA
gcatactccgtctgctcagggacac

SEQ ID NO: 4209 - RNA, 25 nt, Homo sapiens
  source 1..25: mol_type = unassigned RNA
catactccgtctgctcagggacaca

SEQ ID NO: 4210 - RNA, 25 nt, Homo sapiens
  source 1..25: mol_type = unassigned RNA
tccgtctgctcagggacacagggca

SEQ ID NO: 4211 - RNA, 25 nt, Homo sapiens
  source 1..25: mol_type = unassigned RNA
ccgtctgctcagggacacagggcac

SEQ ID NO: 4212 - RNA, 25 nt, Homo sapiens
  source 1..25: mol_type = unassigned RNA
cgtctgctcagggacacagggcacg

SEQ ID NO: 4213 - RNA, 25 nt, Homo sapiens
  source 1..25: mol_type = unassigned RNA
gtctgctcagggacacagggcacgg

SEQ ID NO: 4214 - RNA, 25 nt, Homo sapiens
  source 1..25: mol_type = unassigned RNA
tctgctcagggacacagggcacggg

SEQ ID NO: 4215 - RNA, 25 nt, Homo sapiens
  source 1..25: mol_type = unassigned RNA
cagggacacagggcacggggggctc

SEQ ID NO: 4216 - RNA, 25 nt, Homo sapiens
  source 1..25: mol_type = unassigned RNA
agggacacagggcacggggggctcc

SEQ ID NO: 4217 - RNA, 25 nt, Homo sapiens
  source 1..25: mol_type = unassigned RNA
gggacacagggcacggggggctccg

SEQ ID NO: 4218 - RNA, 25 nt, Homo sapiens
  source 1..25: mol_type = unassigned RNA
gggctccggggtcttctctcgccac

SEQ ID NO: 4219 - RNA, 25 nt, Homo sapiens
  source 1..25: mol_type = unassigned RNA
gctccccatagtccacagagaacac

SEQ ID NO: 4220 - RNA, 25 nt, Homo sapiens
  source 1..25: mol_type = unassigned RNA
ccatagtccacagagaacacaggca

SEQ ID NO: 4221 - RNA, 25 nt, Homo sapiens
  source 1..25: mol_type = unassigned RNA
tccacagagaacacaggcacggctg

SEQ ID NO: 4222 - RNA, 25 nt, Homo sapiens
  source 1..25: mol_type = unassigned RNA
ccacagagaacacaggcacggctga

SEQ ID NO: 4223 - RNA, 25 nt, Homo sapiens
  source 1..25: mol_type = unassigned RNA
cacagagaacacaggcacggctgag

SEQ ID NO: 4224 - RNA, 25 nt, Homo sapiens
  source 1..25: mol_type = unassigned RNA
acggctgaggggtcctccttctttg

SEQ ID NO: 4225 - RNA, 25 nt, Homo sapiens
  source 1..25: mol_type = unassigned RNA
aggggtcctccttctttgaggagaa

SEQ ID NO: 4226 - RNA, 25 nt, Homo sapiens
  source 1..25: mol_type = unassigned RNA
ggggtcctccttctttgaggagaaa

SEQ ID NO: 4227 - RNA, 25 nt, Homo sapiens
  source 1..25: mol_type = unassigned RNA
cctccttctttgaggagaaagggag

SEQ ID NO: 4228 - RNA, 25 nt, Homo sapiens
  source 1..25: mol_type = unassigned RNA
ctccttctttgaggagaaagggaga

SEQ ID NO: 4229 - RNA, 25 nt, Homo sapiens
  source 1..25: mol_type = unassigned RNA
ggagttctgtcctgtctggtggctg

SEQ ID NO: 4230 - RNA, 25 nt, Homo sapiens
  source 1..25: mol_type = unassigned RNA
tgctaaggagttctgtcctgtctgg

SEQ ID NO: 4231 - RNA, 25 nt, Homo sapiens
  source 1..25: mol_type = unassigned RNA
gcatgctaaggagttctgtcctgtc

SEQ ID NO: 4232 - RNA, 25 nt, Homo sapiens
  source 1..25: mol_type = unassigned RNA
tataattaaatatgagagcatgcta

SEQ ID NO: 4233 - RNA, 25 nt, Homo sapiens
  source 1..25: mol_type = unassigned RNA
tgggacaagggatcccccttccctg

SEQ ID NO: 4234 - RNA, 25 nt, Homo sapiens
  source 1..25: mol_type = unassigned RNA
gcaggcacctgagtggctgggacaa

SEQ ID NO: 4235 - RNA, 25 nt, Homo sapiens
  source 1..25: mol_type = unassigned RNA
agcaggcacctgagtggctgggaca

SEQ ID NO: 4236 - RNA, 25 nt, Homo sapiens
  source 1..25: mol_type = unassigned RNA
gcggccagcaggcacctgagtggct

SEQ ID NO: 4237 - RNA, 25 nt, Homo sapiens
  source 1..25: mol_type = unassigned RNA
ggcggccagcaggcacctgagtggc

SEQ ID NO: 4238 - RNA, 25 nt, Homo sapiens
  source 1..25: mol_type = unassigned RNA
tccaggcggccagcaggcacctgag

SEQ ID NO: 4239 - RNA, 25 nt, Homo sapiens
  source 1..25: mol_type = unassigned RNA
ggccaccagcatccaggcggccagc

SEQ ID NO: 4240 - RNA, 25 nt, Homo sapiens
  source 1..25: mol_type = unassigned RNA
tggggcagggccaccagcatccagg

SEQ ID NO: 4241 - RNA, 25 nt, Homo sapiens
  source 1..25: mol_type = unassigned RNA
tcctggggcagggccaccagcatcc

SEQ ID NO: 4242 - RNA, 25 nt, Homo sapiens
  source 1..25: mol_type = unassigned RNA
acactgcacccccactcctggggca

SEQ ID NO: 4243 - RNA, 25 nt, Homo sapiens
  source 1..25: mol_type = unassigned RNA
cacactgcacccccactcctggggc

SEQ ID NO: 4244 - RNA, 25 nt, Homo sapiens
  source 1..25: mol_type = unassigned RNA
tccacacactgcacccccactcctg

SEQ ID NO: 4245 - RNA, 25 nt, Homo sapiens
  source 1..25: mol_type = unassigned RNA
atccacacactgcacccccactcct

SEQ ID NO: 4246 - RNA, 25 nt, Homo sapiens
  source 1..25: mol_type = unassigned RNA
catccacacactgcacccccactcc

SEQ ID NO: 4247 - RNA, 25 nt, Homo sapiens
  source 1..25: mol_type = unassigned RNA
cccccggggcctagtacccccgccg

SEQ ID NO: 4248 - RNA, 25 nt, Homo sapiens
  source 1..25: mol_type = unassigned RNA
gtgggaaggtacaggcgttcccccg

SEQ ID NO: 4249 - RNA, 25 nt, Homo sapiens
  source 1..25: mol_type = unassigned RNA
ggtgggaaggtacaggcgttccccc

SEQ ID NO: 4250 - RNA, 25 nt, Homo sapiens
  source 1..25: mol_type = unassigned RNA
gggtgggaaggtacaggcgttcccc

SEQ ID NO: 4251 - RNA, 25 nt, Homo sapiens
  source 1..25: mol_type = unassigned RNA
caccagggcctgggtgggaaggtac

SEQ ID NO: 4252 - RNA, 25 nt, Homo sapiens
  source 1..25: mol_type = unassigned RNA
ggctcccaccagggcctgggtggga

SEQ ID NO: 4253 - RNA, 25 nt, Homo sapiens
  source 1..25: mol_type = unassigned RNA
gccgggctcccaccagggcctgggt

SEQ ID NO: 4254 - RNA, 25 nt, Homo sapiens
  source 1..25: mol_type = unassigned RNA
ggccgggctcccaccagggcctggg

SEQ ID NO: 4255 - RNA, 25 nt, Homo sapiens
  source 1..25: mol_type = unassigned RNA
gttggccgggctcccaccagggcct

SEQ ID NO: 4256 - RNA, 25 nt, Homo sapiens
  source 1..25: mol_type = unassigned RNA
ggttggccgggctcccaccagggcc

SEQ ID NO: 4257 - RNA, 25 nt, Homo sapiens
  source 1..25: mol_type = unassigned RNA
aaaggggttggccgggctcccacca

SEQ ID NO: 4258 - RNA, 25 nt, Homo sapiens
  source 1..25: mol_type = unassigned RNA
taaaggggttggccgggctcccacc

SEQ ID NO: 4259 - RNA, 25 nt, Homo sapiens
  source 1..25: mol_type = unassigned RNA
ctgaaattatttaaaggggttggcc

SEQ ID NO: 4260 - RNA, 25 nt, Homo sapiens
  source 1..25: mol_type = unassigned RNA
cctgaaattatttaaaggggttggc

SEQ ID NO: 4261 - RNA, 25 nt, Homo sapiens
  source 1..25: mol_type = unassigned RNA
cattcctgaaattatttaaaggggt

SEQ ID NO: 4262 - RNA, 25 nt, Homo sapiens
  source 1..25: mol_type = unassigned RNA
aacccattcctgaaattatttaaag

SEQ ID NO: 4263 - RNA, 25 nt, Homo sapiens
  source 1..25: mol_type = unassigned RNA
gaacccattcctgaaattatttaaa

SEQ ID NO: 4264 - RNA, 25 nt, Homo sapiens
  source 1..25: mol_type = unassigned RNA
ggaacccattcctgaaattatttaa

SEQ ID NO: 4265 - RNA, 25 nt, Homo sapiens
  source 1..25: mol_type = unassigned RNA
atgtgcccaccctgggagctctcct

SEQ ID NO: 4266 - RNA, 25 nt, Homo sapiens
  source 1..25: mol_type = unassigned RNA
ctagggccccccatgtgcccaccct

SEQ ID NO: 4267 - RNA, 25 nt, Homo sapiens
  source 1..25: mol_type = unassigned RNA
cctagggccccccatgtgcccaccc

SEQ ID NO: 4268 - RNA, 25 nt, Homo sapiens
  source 1..25: mol_type = unassigned RNA
gggagggcagaagtgcaggcaccta

SEQ ID NO: 4269 - RNA, 25 nt, Homo sapiens
  source 1..25: mol_type = unassigned RNA
tgggagggcagaagtgcaggcacct

SEQ ID NO: 4270 - RNA, 25 nt, Homo sapiens
  source 1..25: mol_type = unassigned RNA
ctgggtgttgggagggcagaagtgc

SEQ ID NO: 4271 - RNA, 25 nt, Homo sapiens
  source 1..25: mol_type = unassigned RNA
agctgtggccacctgggtgttggga

SEQ ID NO: 4272 - RNA, 25 nt, Homo sapiens
  source 1..25: mol_type = unassigned RNA
cagctgtggccacctgggtgttggg

SEQ ID NO: 4273 - RNA, 25 nt, Homo sapiens
  source 1..25: mol_type = unassigned RNA
tcccagctgtggccacctgggtgtt

SEQ ID NO: 4274 - RNA, 25 nt, Homo sapiens
  source 1..25: mol_type = unassigned RNA
ctcccagctgtggccacctgggtgt

SEQ ID NO: 4275 - RNA, 25 nt, Homo sapiens
  source 1..25: mol_type = unassigned RNA
aggcccctcccagctgtggccacct

SEQ ID NO: 4276 - RNA, 25 nt, Homo sapiens
  source 1..25: mol_type = unassigned RNA
caggcccctcccagctgtggccacc

SEQ ID NO: 4277 - RNA, 25 nt, Homo sapiens
  source 1..25: mol_type = unassigned RNA
ggttgactcaggcccctcccagctg

SEQ ID NO: 4278 - RNA, 25 nt, Homo sapiens
  source 1..25: mol_type = unassigned RNA
aggagggcagggctggggttgactc

SEQ ID NO: 4279 - RNA, 25 nt, Homo sapiens
  source 1..25: mol_type = unassigned RNA
tcccaaggtcaggagggcagggctg

SEQ ID NO: 4280 - RNA, 25 nt, Homo sapiens
  source 1..25: mol_type = unassigned RNA
gtcccaaggtcaggagggcagggct

SEQ ID NO: 4281 - RNA, 25 nt, Homo sapiens
  source 1..25: mol_type = unassigned RNA
ggtcccaaggtcaggagggcagggc

SEQ ID NO: 4282 - RNA, 25 nt, Homo sapiens
  source 1..25: mol_type = unassigned RNA
ctacggtcccaaggtcaggagggca

SEQ ID NO: 4283 - RNA, 25 nt, Homo sapiens
  source 1..25: mol_type = unassigned RNA
cctacggtcccaaggtcaggagggc

SEQ ID NO: 4284 - RNA, 25 nt, Homo sapiens
  source 1..25: mol_type = unassigned RNA
acatcctacggtcccaaggtcagga

SEQ ID NO: 4285 - RNA, 25 nt, Homo sapiens
  source 1..25: mol_type = unassigned RNA
gacatcctacggtcccaaggtcagg

SEQ ID NO: 4286 - RNA, 25 nt, Homo sapiens
  source 1..25: mol_type = unassigned RNA
agggacatcctacggtcccaaggtc

SEQ ID NO: 4287 - RNA, 25 nt, Homo sapiens
  source 1..25: mol_type = unassigned RNA
gggagagggacatcctacggtccca

SEQ ID NO: 4288 - RNA, 25 nt, Homo sapiens
  source 1..25: mol_type = unassigned RNA
caccactcgggagagggacatccta

SEQ ID NO: 4289 - RNA, 25 nt, Homo sapiens
  source 1..25: mol_type = unassigned RNA
ccagcccctcacaccactcgggaga

SEQ ID NO: 4290 - RNA, 25 nt, Homo sapiens
  source 1..25: mol_type = unassigned RNA
cccagcccctcacaccactcgggag

SEQ ID NO: 4291 - RNA, 25 nt, Homo sapiens
  source 1..25: mol_type = unassigned RNA
tccaccccagcccctcacaccactc

SEQ ID NO: 4292 - RNA, 25 nt, Homo sapiens
  source 1..25: mol_type = unassigned RNA
ttccaccccagcccctcacaccact

SEQ ID NO: 4293 - RNA, 25 nt, Homo sapiens
  source 1..25: mol_type = unassigned RNA
ggcctttcaggcccagccagcactc

SEQ ID NO: 4294 - RNA, 25 nt, Homo sapiens
  source 1..25: mol_type = unassigned RNA
gggcaggcagagctggaggcctttc

SEQ ID NO: 4295 - RNA, 25 nt, Homo sapiens
  source 1..25: mol_type = unassigned RNA
gcagtaagcgggcaggcagagctgg

SEQ ID NO: 4296 - RNA, 25 nt, Homo sapiens
  source 1..25: mol_type = unassigned RNA
gaggcagtaagcgggcaggcagagc

SEQ ID NO: 4297 - RNA, 25 nt, Homo sapiens
  source 1..25: mol_type = unassigned RNA
agggaagctgaggcagtaagcgggc

SEQ ID NO: 4298 - RNA, 25 nt, Homo sapiens
  source 1..25: mol_type = unassigned RNA
gggcagggaagctgaggcagtaagc

SEQ ID NO: 4299 - RNA, 25 nt, Homo sapiens
  source 1..25: mol_type = unassigned RNA
ggggcagggaagctgaggcagtaag

SEQ ID NO: 4300 - RNA, 25 nt, Homo sapiens
  source 1..25: mol_type = unassigned RNA
ggccctttgtggggcagggaagctg

SEQ ID NO: 4301 - RNA, 25 nt, Homo sapiens
  source 1..25: mol_type = unassigned RNA
agcacctcaggccctttgtggggca

SEQ ID NO: 4302 - RNA, 25 nt, Homo sapiens
  source 1..25: mol_type = unassigned RNA
cagcacctcaggccctttgtggggc

SEQ ID NO: 4303 - RNA, 25 nt, Homo sapiens
  source 1..25: mol_type = unassigned RNA
caggcagcacctcaggccctttgtg

SEQ ID NO: 4304 - RNA, 25 nt, Homo sapiens
  source 1..25: mol_type = unassigned RNA
ccaggcagcacctcaggccctttgt

SEQ ID NO: 4305 - RNA, 25 nt, Homo sapiens
  source 1..25: mol_type = unassigned RNA
cccaggcagcacctcaggccctttg

SEQ ID NO: 4306 - RNA, 25 nt, Homo sapiens
  source 1..25: mol_type = unassigned RNA
tttacacatgcccaggcagcacctc

SEQ ID NO: 4307 - RNA, 25 nt, Homo sapiens
  source 1..25: mol_type = unassigned RNA
aacccctccacctttacacatgccc

SEQ ID NO: 4308 - RNA, 25 nt, Homo sapiens
  source 1..25: mol_type = unassigned RNA
agctcctggctgtggtgggcagggc

SEQ ID NO: 4309 - RNA, 25 nt, Homo sapiens
  source 1..25: mol_type = unassigned RNA
gaagagctcctggctgtggtgggca

SEQ ID NO: 4310 - RNA, 25 nt, Homo sapiens
  source 1..25: mol_type = unassigned RNA
agaagagctcctggctgtggtgggc

SEQ ID NO: 4311 - RNA, 25 nt, Homo sapiens
  source 1..25: mol_type = unassigned RNA
ggtcagaagagctcctggctgtggt

SEQ ID NO: 4312 - RNA, 25 nt, Homo sapiens
  source 1..25: mol_type = unassigned RNA
aggtcagaagagctcctggctgtgg

SEQ ID NO: 4313 - RNA, 25 nt, Homo sapiens
  source 1..25: mol_type = unassigned RNA
ggaaggtcagaagagctcctggctg

SEQ ID NO: 4314 - RNA, 25 nt, Homo sapiens
  source 1..25: mol_type = unassigned RNA
tttcagggaaggtcagaagagctcc

SEQ ID NO: 4315 - RNA, 25 nt, Homo sapiens
  source 1..25: mol_type = unassigned RNA
tgcaggcctagagaagtttcaggga

SEQ ID NO: 4316 - RNA, 25 nt, Homo sapiens
  source 1..25: mol_type = unassigned RNA
tccctgcaggcctagagaagtttca

SEQ ID NO: 4317 - RNA, 25 nt, Homo sapiens
  source 1..25: mol_type = unassigned RNA
ctccctgcaggcctagagaagtttc

SEQ ID NO: 4318 - RNA, 25 nt, Homo sapiens
  source 1..25: mol_type = unassigned RNA
tccccaggagttatctgctccctgc

SEQ ID NO: 4319 - RNA, 25 nt, Homo sapiens
  source 1..25: mol_type = unassigned RNA
aggtacatggggctggggactcccc

SEQ ID NO: 4320 - RNA, 25 nt, Homo sapiens
  source 1..25: mol_type = unassigned RNA
caggagtgggaggtacatggggctg

SEQ ID NO: 4321 - RNA, 25 nt, Homo sapiens
  source 1..25: mol_type = unassigned RNA
acaggagtgggaggtacatggggct

SEQ ID NO: 4322 - RNA, 25 nt, Homo sapiens
  source 1..25: mol_type = unassigned RNA
cacaggagtgggaggtacatggggc

SEQ ID NO: 4323 - RNA, 25 nt, Homo sapiens
  source 1..25: mol_type = unassigned RNA
tgggcacaggagtgggaggtacatg

SEQ ID NO: 4324 - RNA, 25 nt, Homo sapiens
  source 1..25: mol_type = unassigned RNA
ctgggcacaggagtgggaggtacat

SEQ ID NO: 4325 - RNA, 25 nt, Homo sapiens
  source 1..25: mol_type = unassigned RNA
actgggcacaggagtgggaggtaca

SEQ ID NO: 4326 - RNA, 25 nt, Homo sapiens
  source 1..25: mol_type = unassigned RNA
gcccaagactgggcacaggagtggg

SEQ ID NO: 4327 - RNA, 25 nt, Homo sapiens
  source 1..25: mol_type = unassigned RNA
agggcccaagactgggcacaggagt

SEQ ID NO: 4328 - RNA, 25 nt, Homo sapiens
  source 1..25: mol_type = unassigned RNA
cagggcccaagactgggcacaggag

SEQ ID NO: 4329 - RNA, 25 nt, Homo sapiens
  source 1..25: mol_type = unassigned RNA
ggacgcagggcccaagactgggcac

SEQ ID NO: 4330 - RNA, 25 nt, Homo sapiens
  source 1..25: mol_type = unassigned RNA
cgccctggacgcagggcccaagact

SEQ ID NO: 4331 - RNA, 25 nt, Homo sapiens
  source 1..25: mol_type = unassigned RNA
acgccctggacgcagggcccaagac

SEQ ID NO: 4332 - RNA, 25 nt, Homo sapiens
  source 1..25: mol_type = unassigned RNA
ggcatcccgaaacgccctggacgca

SEQ ID NO: 4333 - RNA, 25 nt, Homo sapiens
  source 1..25: mol_type = unassigned RNA
tggcatcccgaaacgccctggacgc

SEQ ID NO: 4334 - RNA, 25 nt, Homo sapiens
  source 1..25: mol_type = unassigned RNA
ctggcagtggcatcccgaaacgccc

SEQ ID NO: 4335 - RNA, 25 nt, Homo sapiens
  source 1..25: mol_type = unassigned RNA
ggagcagccaaggtgcccctggcag

SEQ ID NO: 4336 - RNA, 25 nt, Homo sapiens
  source 1..25: mol_type = unassigned RNA
ggccttggagcagccaaggtgcccc

SEQ ID NO: 4337 - RNA, 25 nt, Homo sapiens
  source 1..25: mol_type = unassigned RNA
gttggagatggccttggagcagcca

SEQ ID NO: 4338 - RNA, 25 nt, Homo sapiens
  source 1..25: mol_type = unassigned RNA
cttgggggctggttggagatggcct

SEQ ID NO: 4339 - RNA, 25 nt, Homo sapiens
  source 1..25: mol_type = unassigned RNA
cctgaacttgggggctggttggaga

SEQ ID NO: 4340 - RNA, 25 nt, Homo sapiens
  source 1..25: mol_type = unassigned RNA
ctcctgcctgaacttgggggctggt

SEQ ID NO: 4341 - RNA, 25 nt, Homo sapiens
  source 1..25: mol_type = unassigned RNA
gagcctcctgcctgaacttgggggc

SEQ ID NO: 4342 - RNA, 25 nt, Homo sapiens
  source 1..25: mol_type = unassigned RNA
cccggagcctcctgcctgaacttgg

SEQ ID NO: 4343 - RNA, 25 nt, Homo sapiens
  source 1..25: mol_type = unassigned RNA
ccccggagcctcctgcctgaacttg

SEQ ID NO: 4344 - RNA, 25 nt, Homo sapiens
  source 1..25: mol_type = unassigned RNA
gccccggagcctcctgcctgaactt

SEQ ID NO: 4345 - RNA, 25 nt, Homo sapiens
  source 1..25: mol_type = unassigned RNA
cgccccggagcctcctgcctgaact

SEQ ID NO: 4346 - RNA, 25 nt, Homo sapiens
  source 1..25: mol_type = unassigned RNA
ggcgccgtggccctgcctgacgccc

SEQ ID NO: 4347 - RNA, 25 nt, Homo sapiens
  source 1..25: mol_type = unassigned RNA
ctgcggcccggggctgaaggcgccg

SEQ ID NO: 4348 - RNA, 25 nt, Homo sapiens
  source 1..25: mol_type = unassigned RNA
cgacgacgctgcggcccggggctga

SEQ ID NO: 4349 - RNA, 25 nt, Homo sapiens
  source 1..25: mol_type = unassigned RNA
acgacgacgacgacgctgcggcccg

SEQ ID NO: 4350 - RNA, 25 nt, Homo sapiens
  source 1..25: mol_type = unassigned RNA
gacgacgacgacgacgctgcggccc

SEQ ID NO: 4351 - RNA, 25 nt, Homo sapiens
  source 1..25: mol_type = unassigned RNA
cgacgacgacgacgacgctgcggcc

SEQ ID NO: 4352 - RNA, 25 nt, Homo sapiens
  source 1..25: mol_type = unassigned RNA
gacgacgacgacgacgacgacgctg

SEQ ID NO: 4353 - RNA, 25 nt, Homo sapiens
  source 1..25: mol_type = unassigned RNA
gagggccagatgcagtcactgcttc

SEQ ID NO: 4354 - RNA, 25 nt, Homo sapiens
  source 1..25: mol_type = unassigned RNA
caggtgtcaccgtcccctacaggga

SEQ ID NO: 4355 - RNA, 25 nt, Homo sapiens
  source 1..25: mol_type = unassigned RNA
gcaggtgtcaccgtcccctacaggg

SEQ ID NO: 4356 - RNA, 25 nt, Homo sapiens
  source 1..25: mol_type = unassigned RNA
gcagcaggtgtcaccgtcccctaca

SEQ ID NO: 4357 - RNA, 25 nt, Homo sapiens
  source 1..25: mol_type = unassigned RNA
ggcagcaggtgtcaccgtcccctac

SEQ ID NO: 4358 - RNA, 25 nt, Homo sapiens
  source 1..25: mol_type = unassigned RNA
aatgcccacagtgagcccaggcagc

SEQ ID NO: 4359 - RNA, 25 nt, Homo sapiens
  source 1..25: mol_type = unassigned RNA
atgtctcaatgcccacagtgagccc

SEQ ID NO: 4360 - RNA, 25 nt, Homo sapiens
  source 1..25: mol_type = unassigned RNA
cctgcaccaggcacagccccaccac

SEQ ID NO: 4361 - RNA, 25 nt, Homo sapiens
  source 1..25: mol_type = unassigned RNA
cggggctccagcctgcacctgcacc

SEQ ID NO: 4362 - RNA, 25 nt, Homo sapiens
  source 1..25: mol_type = unassigned RNA
gggctgagctgcctgggggcgaccg

SEQ ID NO: 4363 - RNA, 25 nt, Homo sapiens
  source 1..25: mol_type = unassigned RNA
ggggctgagctgcctgggggcgacc

SEQ ID NO: 4364 - RNA, 25 nt, Homo sapiens
  source 1..25: mol_type = unassigned RNA
aggggctgagctgcctgggggcgac

SEQ ID NO: 4365 - RNA, 25 nt, Homo sapiens
  source 1..25: mol_type = unassigned RNA
gccgtccaggggctgagctgcctgg

SEQ ID NO: 4366 - RNA, 25 nt, Homo sapiens
  source 1..25: mol_type = unassigned RNA
ggccgtccaggggctgagctgcctg

SEQ ID NO: 4367 - RNA, 25 nt, Homo sapiens
  source 1..25: mol_type = unassigned RNA
aggccgtccaggggctgagctgcct

SEQ ID NO: 4368 - RNA, 25 nt, Homo sapiens
  source 1..25: mol_type = unassigned RNA
caggccgtccaggggctgagctgcc

SEQ ID NO: 4369 - RNA, 25 nt, Homo sapiens
  source 1..25: mol_type = unassigned RNA
gtgcaggccattgcaggccgtccag

SEQ ID NO: 4370 - RNA, 25 nt, Homo sapiens
  source 1..25: mol_type = unassigned RNA
ggtgcaggccattgcaggccgtcca

SEQ ID NO: 4371 - RNA, 25 nt, Homo sapiens
  source 1..25: mol_type = unassigned RNA
gggtgcaggccattgcaggccgtcc

SEQ ID NO: 4372 - RNA, 25 nt, Homo sapiens
  source 1..25: mol_type = unassigned RNA
aagcaggcagggtgcaggccattgc

SEQ ID NO: 4373 - RNA, 25 nt, Homo sapiens
  source 1..25: mol_type = unassigned RNA
tcctcaggagaagcaggcagggtgc

SEQ ID NO: 4374 - RNA, 25 nt, Homo sapiens
  source 1..25: mol_type = unassigned RNA
cgcatttcctcaggagaagcaggca

SEQ ID NO: 4375 - RNA, 25 nt, Homo sapiens
  source 1..25: mol_type = unassigned RNA
gcgcatttcctcaggagaagcaggc

SEQ ID NO: 4376 - RNA, 25 nt, Homo sapiens
  source 1..25: mol_type = unassigned RNA
gtcagcgcatttcctcaggagaagc

SEQ ID NO: 4377 - RNA, 25 nt, Homo sapiens
  source 1..25: mol_type = unassigned RNA
tgagcccgggtcagcgcatttcctc

SEQ ID NO: 4378 - RNA, 25 nt, Homo sapiens
  source 1..25: mol_type = unassigned RNA
tctgcagaccctccaccatgagccc

SEQ ID NO: 4379 - RNA, 25 nt, Homo sapiens
  source 1..25: mol_type = unassigned RNA
ttctgcagaccctccaccatgagcc

SEQ ID NO: 4380 - RNA, 25 nt, Homo sapiens
  source 1..25: mol_type = unassigned RNA
tcttggcccctctgaccggcttcct

SEQ ID NO: 4381 - RNA, 25 nt, Homo sapiens
  source 1..25: mol_type = unassigned RNA
ggacactgctcttggcccctctgac

SEQ ID NO: 4382 - RNA, 25 nt, Homo sapiens
  source 1..25: mol_type = unassigned RNA
gaggcctgaggatggacactgctct

SEQ ID NO: 4383 - RNA, 25 nt, Homo sapiens
  source 1..25: mol_type = unassigned RNA
gtgcccagccactgaggcctgagga

SEQ ID NO: 4384 - RNA, 25 nt, Homo sapiens
  source 1..25: mol_type = unassigned RNA
cggagtgcccagccactgaggcctg

SEQ ID NO: 4385 - RNA, 25 nt, Homo sapiens
  source 1..25: mol_type = unassigned RNA
cggccctcggagtgcccagccactg

SEQ ID NO: 4386 - RNA, 25 nt, Homo sapiens
  source 1..25: mol_type = unassigned RNA
ccgcaggggctcagctgacggccct

SEQ ID NO: 4387 - RNA, 25 nt, Homo sapiens
  source 1..25: mol_type = unassigned RNA
cccccgcccgcaggggctcagctga

SEQ ID NO: 4388 - RNA, 25 nt, Homo sapiens
  source 1..25: mol_type = unassigned RNA
tgggcacctcatcccccgcccgcag

SEQ ID NO: 4389 - RNA, 25 nt, Homo sapiens
  source 1..25: mol_type = unassigned RNA
atgggcacctcatcccccgcccgca

SEQ ID NO: 4390 - RNA, 25 nt, Homo sapiens
  source 1..25: mol_type = unassigned RNA
aatgggcacctcatcccccgcccgc

SEQ ID NO: 4391 - RNA, 25 nt, Homo sapiens
  source 1..25: mol_type = unassigned RNA
ccaccattgtctttcctagcggaat

SEQ ID NO: 4392 - RNA, 25 nt, Homo sapiens
  source 1..25: mol_type = unassigned RNA
gccaccattgtctttcctagcggaa

SEQ ID NO: 4393 - RNA, 25 nt, Homo sapiens
  source 1..25: mol_type = unassigned RNA
agtatgccaccattgtctttcctag

SEQ ID NO: 4394 - RNA, 25 nt, Homo sapiens
  source 1..25: mol_type = unassigned RNA
cccgtgccctgtgtccctgagcaga

SEQ ID NO: 4395 - RNA, 25 nt, Homo sapiens
  source 1..25: mol_type = unassigned RNA
gatttccagtggcgagagaagaccc

SEQ ID NO: 4396 - RNA, 25 nt, Homo sapiens
  source 1..25: mol_type = unassigned RNA
ggactatggggagctggatttccag

SEQ ID NO: 4397 - RNA, 25 nt, Homo sapiens
  source 1..25: mol_type = unassigned RNA
gtgttctctgtggactatggggagc

SEQ ID NO: 4398 - RNA, 25 nt, Homo sapiens
  source 1..25: mol_type = unassigned RNA
gtgcctgtgttctctgtggactatg

SEQ ID NO: 4399 - RNA, 25 nt, Homo sapiens
  source 1..25: mol_type = unassigned RNA
cgtgcctgtgttctctgtggactat

SEQ ID NO: 4400 - RNA, 25 nt, Homo sapiens
  source 1..25: mol_type = unassigned RNA
ccgtgcctgtgttctctgtggacta

SEQ ID NO: 4401 - RNA, 25 nt, Homo sapiens
  source 1..25: mol_type = unassigned RNA
ccctcagccgtgcctgtgttctctg

SEQ ID NO: 4402 - RNA, 25 nt, Homo sapiens
  source 1..25: mol_type = unassigned RNA
cctctccctttctcctcaaagaagg

SEQ ID NO: 4403 - RNA, 25 nt, Homo sapiens
  source 1..25: mol_type = unassigned RNA
ctccctctccctttctcctcaaaga

SEQ ID NO: 4404 - RNA, 25 nt, Homo sapiens
  source 1..25: mol_type = unassigned RNA
atgcaggaaaagagtgagactcacc

SEQ ID NO: 4405 - RNA, 25 nt, Homo sapiens
  source 1..25: mol_type = unassigned RNA
tgcaggaaaagagtgagactcacca

SEQ ID NO: 4406 - RNA, 25 nt, Homo sapiens
  source 1..25: mol_type = unassigned RNA
gcaggaaaagagtgagactcaccag

SEQ ID NO: 4407 - RNA, 25 nt, Homo sapiens
  source 1..25: mol_type = unassigned RNA
gaaaagagtgagactcaccaggggc

SEQ ID NO: 4408 - RNA, 25 nt, Homo sapiens
  source 1..25: mol_type = unassigned RNA
agagtgagactcaccaggggctggc

SEQ ID NO: 4409 - RNA, 25 nt, Homo sapiens
  source 1..25: mol_type = unassigned RNA
ctcaccaggggctggccggtgcgcc

SEQ ID NO: 4410 - RNA, 25 nt, Homo sapiens
  source 1..25: mol_type = unassigned RNA
tattgtccctgcagagaaacacact

SEQ ID NO: 4411 - RNA, 25 nt, Homo sapiens
  source 1..25: mol_type = unassigned RNA
attgtccctgcagagaaacacactt

SEQ ID NO: 4412 - RNA, 25 nt, Homo sapiens
  source 1..25: mol_type = unassigned RNA
ttgtccctgcagagaaacacacttg

SEQ ID NO: 4413 - RNA, 25 nt, Homo sapiens
  source 1..25: mol_type = unassigned RNA
ggagccaggcgcaccggccagcccc

SEQ ID NO: 4414 - RNA, 25 nt, Homo sapiens
  source 1..25: mol_type = unassigned RNA
cagggacaataggagccaggcgcac

SEQ ID NO: 4415 - RNA, 25 nt, Homo sapiens
  source 1..25: mol_type = unassigned RNA
tttctctgcagggacaataggagcc

SEQ ID NO: 4416 - RNA, 25 nt, Homo sapiens
  source 1..25: mol_type = unassigned RNA
aagtgtgtttctctgcagggacaat

SEQ ID NO: 4417 - RNA, 25 nt, Homo sapiens
  source 1..25: mol_type = unassigned RNA
ggggctgggatgacgttacctcgtg

SEQ ID NO: 4418 - RNA, 25 nt, Homo sapiens
  source 1..25: mol_type = unassigned RNA
tgggatgacgttacctcgtgcggcc

SEQ ID NO: 4419 - RNA, 25 nt, Homo sapiens
  source 1..25: mol_type = unassigned RNA
gggatgacgttacctcgtgcggccc

SEQ ID NO: 4420 - RNA, 25 nt, Homo sapiens
  source 1..25: mol_type = unassigned RNA
cctcgtgcggcccgggagcagatga

SEQ ID NO: 4421 - RNA, 25 nt, Homo sapiens
  source 1..25: mol_type = unassigned RNA
tgcggcccgggagcagatgacggcc

SEQ ID NO: 4422 - RNA, 25 nt, Homo sapiens
  source 1..25: mol_type = unassigned RNA
ggccaggacccagactagcagcacc

SEQ ID NO: 4423 - RNA, 25 nt, Homo sapiens
  source 1..25: mol_type = unassigned RNA
gactagcagcaccaggctgcccagc

SEQ ID NO: 4424 - RNA, 25 nt, Homo sapiens
  source 1..25: mol_type = unassigned RNA
caggccgcccacgacaccaaccacc

SEQ ID NO: 4425 - RNA, 25 nt, Homo sapiens
  source 1..25: mol_type = unassigned RNA
aggccgcccacgacaccaaccacca

SEQ ID NO: 4426 - RNA, 25 nt, Homo sapiens
  source 1..25: mol_type = unassigned RNA
gcccacgacaccaaccaccagggtt

SEQ ID NO: 4427 - RNA, 25 nt, Homo sapiens
  source 1..25: mol_type = unassigned RNA
gacaccaaccaccagggtttggaac

SEQ ID NO: 4428 - RNA, 25 nt, Homo sapiens
  source 1..25: mol_type = unassigned RNA
ctgggtgaggggctggggtgggctg

SEQ ID NO: 4429 - RNA, 25 nt, Homo sapiens
  source 1..25: mol_type = unassigned RNA
tgggtgaggggctggggtgggctgt

SEQ ID NO: 4430 - RNA, 25 nt, Homo sapiens
  source 1..25: mol_type = unassigned RNA
ctgtgggcacttctgcccttctctc

SEQ ID NO: 4431 - RNA, 25 nt, Homo sapiens
  source 1..25: mol_type = unassigned RNA
gggcacttctgcccttctctctgga

SEQ ID NO: 4432 - RNA, 25 nt, Homo sapiens
  source 1..25: mol_type = unassigned RNA
ggcacttctgcccttctctctggaa

SEQ ID NO: 4433 - RNA, 25 nt, Homo sapiens
  source 1..25: mol_type = unassigned RNA
ccgtcatctgctcccgggccgcacg

SEQ ID NO: 4434 - RNA, 25 nt, Homo sapiens
  source 1..25: mol_type = unassigned RNA
tgggtcctggccgtcatctgctccc

SEQ ID NO: 4435 - RNA, 25 nt, Homo sapiens
  source 1..25: mol_type = unassigned RNA
ctgggtcctggccgtcatctgctcc

SEQ ID NO: 4436 - RNA, 25 nt, Homo sapiens
  source 1..25: mol_type = unassigned RNA
agcctggtgctgctagtctgggtcc

SEQ ID NO: 4437 - RNA, 25 nt, Homo sapiens
  source 1..25: mol_type = unassigned RNA
ctgggcagcctggtgctgctagtct

SEQ ID NO: 4438 - RNA, 25 nt, Homo sapiens
  source 1..25: mol_type = unassigned RNA
gctgggcagcctggtgctgctagtc

SEQ ID NO: 4439 - RNA, 25 nt, Homo sapiens
  source 1..25: mol_type = unassigned RNA
gtcgtgggcggcctgctgggcagcc

SEQ ID NO: 4440 - RNA, 25 nt, Homo sapiens
  source 1..25: mol_type = unassigned RNA
tggttggtgtcgtgggcggcctgct

SEQ ID NO: 4441 - RNA, 25 nt, Homo sapiens
  source 1..25: mol_type = unassigned RNA
gtggttggtgtcgtgggcggcctgc

SEQ ID NO: 4442 - RNA, 25 nt, Homo sapiens
  source 1..25: mol_type = unassigned RNA
aaaccctggtggttggtgtcgtggg

SEQ ID NO: 4443 - RNA, 25 nt, Homo sapiens
  source 1..25: mol_type = unassigned RNA
tccaaaccctggtggttggtgtcgt

SEQ ID NO: 4444 - RNA, 25 nt, Homo sapiens
  source 1..25: mol_type = unassigned RNA
ttccaaaccctggtggttggtgtcg

SEQ ID NO: 4445 - RNA, 25 nt, Homo sapiens
  source 1..25: mol_type = unassigned RNA
ggggccagttccaaaccctggtggt

SEQ ID NO: 4446 - RNA, 25 nt, Homo sapiens
  source 1..25: mol_type = unassigned RNA
ggtcggggccagttccaaaccctgg

SEQ ID NO: 4447 - RNA, 25 nt, Homo sapiens
  source 1..25: mol_type = unassigned RNA
tccggtcggggccagttccaaaccc

SEQ ID NO: 4448 - RNA, 25 nt, Homo sapiens
  source 1..25: mol_type = unassigned RNA
tggggtcggggagtgggtccggtcg

SEQ ID NO: 4449 - RNA, 25 nt, Homo sapiens
  source 1..25: mol_type = unassigned RNA
ctggtttgtgcccttccagagagaa

SEQ ID NO: 4450 - RNA, 25 nt, Homo sapiens
  source 1..25: mol_type = unassigned RNA
actggtttgtgcccttccagagaga

SEQ ID NO: 4451 - RNA, 25 nt, Homo sapiens
  source 1..25: mol_type = unassigned RNA
acctgtcaccctgagctctgcccgc

SEQ ID NO: 4452 - RNA, 25 nt, Homo sapiens
  source 1..25: mol_type = unassigned RNA
cgcaggctctctttgatctgcgcct

SEQ ID NO: 4453 - RNA, 25 nt, Homo sapiens
  source 1..25: mol_type = unassigned RNA
gcaggctctctttgatctgcgcctt

SEQ ID NO: 4454 - RNA, 25 nt, Homo sapiens
  source 1..25: mol_type = unassigned RNA
caggctctctttgatctgcgccttg

SEQ ID NO: 4455 - RNA, 25 nt, Homo sapiens
  source 1..25: mol_type = unassigned RNA
aggctctctttgatctgcgccttgg

SEQ ID NO: 4456 - RNA, 25 nt, Homo sapiens
  source 1..25: mol_type = unassigned RNA
ctctttgatctgcgccttgggggcc

SEQ ID NO: 4457 - RNA, 25 nt, Homo sapiens
  source 1..25: mol_type = unassigned RNA
tctttgatctgcgccttgggggcca

SEQ ID NO: 4458 - RNA, 25 nt, Homo sapiens
  source 1..25: mol_type = unassigned RNA
atctgcgccttgggggccagggaga

SEQ ID NO: 4459 - RNA, 25 nt, Homo sapiens
  source 1..25: mol_type = unassigned RNA
gggggccagggagatggccccacag

SEQ ID NO: 4460 - RNA, 25 nt, Homo sapiens
  source 1..25: mol_type = unassigned RNA
gccagggagatggccccacagaggt

SEQ ID NO: 4461 - RNA, 25 nt, Homo sapiens
  source 1..25: mol_type = unassigned RNA
gaggtaggtgccgctgtcattgcgc

SEQ ID NO: 4462 - RNA, 25 nt, Homo sapiens
  source 1..25: mol_type = unassigned RNA
aggtaggtgccgctgtcattgcgcc

SEQ ID NO: 4463 - RNA, 25 nt, Homo sapiens
  source 1..25: mol_type = unassigned RNA
gcgccgggccctgaccacgctcatg

SEQ ID NO: 4464 - RNA, 25 nt, Homo sapiens
  source 1..25: mol_type = unassigned RNA
acgctcatgtggaagtcacgcccgt

SEQ ID NO: 4465 - RNA, 25 nt, Homo sapiens
  source 1..25: mol_type = unassigned RNA
cgctcatgtggaagtcacgcccgtt

SEQ ID NO: 4466 - RNA, 25 nt, Homo sapiens
  source 1..25: mol_type = unassigned RNA
acgcccgttgggcagttgtgtgaca

SEQ ID NO: 4467 - RNA, 25 nt, Homo sapiens
  source 1..25: mol_type = unassigned RNA
gttgggcagttgtgtgacacggaag

SEQ ID NO: 4468 - RNA, 25 nt, Homo sapiens
  source 1..25: mol_type = unassigned RNA
ttgtgtgacacggaagcggcagtcc

SEQ ID NO: 4469 - RNA, 25 nt, Homo sapiens
  source 1..25: mol_type = unassigned RNA
gtgacacggaagcggcagtcctggc

SEQ ID NO: 4470 - RNA, 25 nt, Homo sapiens
  source 1..25: mol_type = unassigned RNA
tgacacggaagcggcagtcctggcc

SEQ ID NO: 4471 - RNA, 25 nt, Homo sapiens
  source 1..25: mol_type = unassigned RNA
acggaagcggcagtcctggccgggc

SEQ ID NO: 4472 - RNA, 25 nt, Homo sapiens
  source 1..25: mol_type = unassigned RNA
gcggcagtcctggccgggctggctg

SEQ ID NO: 4473 - RNA, 25 nt, Homo sapiens
  source 1..25: mol_type = unassigned RNA
tcctggccgggctggctgcggtcct

SEQ ID NO: 4474 - RNA, 25 nt, Homo sapiens
  source 1..25: mol_type = unassigned RNA
cctggccgggctggctgcggtcctc

SEQ ID NO: 4475 - RNA, 25 nt, Homo sapiens
  source 1..25: mol_type = unassigned RNA
ctggccgggctggctgcggtcctcg

SEQ ID NO: 4476 - RNA, 25 nt, Homo sapiens
  source 1..25: mol_type = unassigned RNA
ccgggctggctgcggtcctcgggga

SEQ ID NO: 4477 - RNA, 25 nt, Homo sapiens
  source 1..25: mol_type = unassigned RNA
ggctggctgcggtcctcggggaagg

SEQ ID NO: 4478 - RNA, 25 nt, Homo sapiens
  source 1..25: mol_type = unassigned RNA
ggggaaggcggccagcttgtccgtc

SEQ ID NO: 4479 - RNA, 25 nt, Homo sapiens
  source 1..25: mol_type = unassigned RNA
gcggccagcttgtccgtctggttgc

SEQ ID NO: 4480 - RNA, 25 nt, Homo sapiens
  source 1..25: mol_type = unassigned RNA
cggccagcttgtccgtctggttgct

SEQ ID NO: 4481 - RNA, 25 nt, Homo sapiens
  source 1..25: mol_type = unassigned RNA
ggccagcttgtccgtctggttgctg

SEQ ID NO: 4482 - RNA, 25 nt, Homo sapiens
  source 1..25: mol_type = unassigned RNA
gtccgtctggttgctggggctcatg

SEQ ID NO: 4483 - RNA, 25 nt, Homo sapiens
  source 1..25: mol_type = unassigned RNA
tttagcacgaagctctccgatgtgt

SEQ ID NO: 4484 - RNA, 25 nt, Homo sapiens
  source 1..25: mol_type = unassigned RNA
ctctccgatgtgttggagaagctgc

SEQ ID NO: 4485 - RNA, 25 nt, Homo sapiens
  source 1..25: mol_type = unassigned RNA
gatgtgttggagaagctgcaggtga

SEQ ID NO: 4486 - RNA, 25 nt, Homo sapiens
  source 1..25: mol_type = unassigned RNA
gtgttggagaagctgcaggtgaagg

SEQ ID NO: 4487 - RNA, 25 nt, Homo sapiens
  source 1..25: mol_type = unassigned RNA
caggtgaaggtggcgttgtcccctt

SEQ ID NO: 4488 - RNA, 25 nt, Homo sapiens
  source 1..25: mol_type = unassigned RNA
gttgtccccttcggtcaccacgagc

SEQ ID NO: 4489 - RNA, 25 nt, Homo sapiens
  source 1..25: mol_type = unassigned RNA
ttgtccccttcggtcaccacgagca

SEQ ID NO: 4490 - RNA, 25 nt, Homo sapiens
  source 1..25: mol_type = unassigned RNA
ccccttcggtcaccacgagcagggc

SEQ ID NO: 4491 - RNA, 25 nt, Homo sapiens
  source 1..25: mol_type = unassigned RNA
cccttcggtcaccacgagcagggct

SEQ ID NO: 4492 - RNA, 25 nt, Homo sapiens
  source 1..25: mol_type = unassigned RNA
ccttcggtcaccacgagcagggctg

SEQ ID NO: 4493 - RNA, 25 nt, Homo sapiens
  source 1..25: mol_type = unassigned RNA
gtcaccacgagcagggctggggaga

SEQ ID NO: 4494 - RNA, 25 nt, Homo sapiens
  source 1..25: mol_type = unassigned RNA
accacgagcagggctggggagaagg

SEQ ID NO: 4495 - RNA, 25 nt, Homo sapiens
  source 1..25: mol_type = unassigned RNA
ccacgagcagggctggggagaaggt

SEQ ID NO: 4496 - RNA, 25 nt, Homo sapiens
  source 1..25: mol_type = unassigned RNA
cacgagcagggctggggagaaggtg

SEQ ID NO: 4497 - RNA, 25 nt, Homo sapiens
  source 1..25: mol_type = unassigned RNA
acgagcagggctggggagaaggtgg

SEQ ID NO: 4498 - RNA, 25 nt, Homo sapiens
  source 1..25: mol_type = unassigned RNA
cgagcagggctggggagaaggtggg

SEQ ID NO: 4499 - RNA, 25 nt, Homo sapiens
  source 1..25: mol_type = unassigned RNA
gagcagggctggggagaaggtgggg

SEQ ID NO: 4500 - RNA, 25 nt, Homo sapiens
  source 1..25: mol_type = unassigned RNA
gctggggagaaggtgggggggttcc

SEQ ID NO: 4501 - RNA, 25 nt, Homo sapiens
  source 1..25: mol_type = unassigned RNA
ctggggagaaggtgggggggttcca

SEQ ID NO: 4502 - RNA, 25 nt, Homo sapiens
  source 1..25: mol_type = unassigned RNA
aggtgggggggttccagggcctgtc

SEQ ID NO: 4503 - RNA, 25 nt, Homo sapiens
  source 1..25: mol_type = unassigned RNA
ggtgggggggttccagggcctgtct

SEQ ID NO: 4504 - RNA, 25 nt, Homo sapiens
  source 1..25: mol_type = unassigned RNA
gtgggggggttccagggcctgtctg

SEQ ID NO: 4505 - RNA, 25 nt, Homo sapiens
  source 1..25: mol_type = unassigned RNA
gggcctgtctggggagtctgagaga

SEQ ID NO: 4506 - RNA, 25 nt, Homo sapiens
  source 1..25: mol_type = unassigned RNA
tctggggagtctgagagatggagag

SEQ ID NO: 4507 - RNA, 25 nt, Homo sapiens
  source 1..25: mol_type = unassigned RNA
ggagtctgagagatggagagaggtg

SEQ ID NO: 4508 - RNA, 25 nt, Homo sapiens
  source 1..25: mol_type = unassigned RNA
gacaggtgcggcctcggaggccccg

SEQ ID NO: 4509 - RNA, 25 nt, Homo sapiens
  source 1..25: mol_type = unassigned RNA
tgacaggtgcggcctcggaggcccc

SEQ ID NO: 4510 - RNA, 25 nt, Homo sapiens
  source 1..25: mol_type = unassigned RNA
gtgacaggtgcggcctcggaggccc

SEQ ID NO: 4511 - RNA, 25 nt, Homo sapiens
  source 1..25: mol_type = unassigned RNA
ctcagggtgacaggtgcggcctcgg

SEQ ID NO: 4512 - RNA, 25 nt, Homo sapiens
  source 1..25: mol_type = unassigned RNA
gagctcagggtgacaggtgcggcct

SEQ ID NO: 4513 - RNA, 25 nt, Homo sapiens
  source 1..25: mol_type = unassigned RNA
cgggcagagctcagggtgacaggtg

SEQ ID NO: 4514 - RNA, 25 nt, Homo sapiens
  source 1..25: mol_type = unassigned RNA
gcctgcgggcagagctcagggtgac

SEQ ID NO: 4515 - RNA, 25 nt, Homo sapiens
  source 1..25: mol_type = unassigned RNA
aaagagagcctgcgggcagagctca

SEQ ID NO: 4516 - RNA, 25 nt, Homo sapiens
  source 1..25: mol_type = unassigned RNA
caaagagagcctgcgggcagagctc

SEQ ID NO: 4517 - RNA, 25 nt, Homo sapiens
  source 1..25: mol_type = unassigned RNA
aaggcgcagatcaaagagagcctgc

SEQ ID NO: 4518 - RNA, 25 nt, Homo sapiens
  source 1..25: mol_type = unassigned RNA
caaggcgcagatcaaagagagcctg

SEQ ID NO: 4519 - RNA, 25 nt, Homo sapiens
  source 1..25: mol_type = unassigned RNA
tgtggggccatctccctggccccca

SEQ ID NO: 4520 - RNA, 25 nt, Homo sapiens
  source 1..25: mol_type = unassigned RNA
acctacctctgtggggccatctccc

SEQ ID NO: 4521 - RNA, 25 nt, Homo sapiens
  source 1..25: mol_type = unassigned RNA
aatgacagcggcacctacctctgtg

SEQ ID NO: 4522 - RNA, 25 nt, Homo sapiens
  source 1..25: mol_type = unassigned RNA
caatgacagcggcacctacctctgt

SEQ ID NO: 4523 - RNA, 25 nt, Homo sapiens
  source 1..25: mol_type = unassigned RNA
gcaatgacagcggcacctacctctg

SEQ ID NO: 4524 - RNA, 25 nt, Homo sapiens
  source 1..25: mol_type = unassigned RNA
tggtcagggcccggcgcaatgacag

SEQ ID NO: 4525 - RNA, 25 nt, Homo sapiens
  source 1..25: mol_type = unassigned RNA
cttccacatgagcgtggtcagggcc

SEQ ID NO: 4526 - RNA, 25 nt, Homo sapiens
  source 1..25: mol_type = unassigned RNA
cgtgacttccacatgagcgtggtca

SEQ ID NO: 4527 - RNA, 25 nt, Homo sapiens
  source 1..25: mol_type = unassigned RNA
gcgtgacttccacatgagcgtggtc

SEQ ID NO: 4528 - RNA, 25 nt, Homo sapiens
  source 1..25: mol_type = unassigned RNA
aacgggcgtgacttccacatgagcg

SEQ ID NO: 4529 - RNA, 25 nt, Homo sapiens
  source 1..25: mol_type = unassigned RNA
cttccgtgtcacacaactgcccaac

SEQ ID NO: 4530 - RNA, 25 nt, Homo sapiens
  source 1..25: mol_type = unassigned RNA
gcttccgtgtcacacaactgcccaa

SEQ ID NO: 4531 - RNA, 25 nt, Homo sapiens
  source 1..25: mol_type = unassigned RNA
cccgaggaccgcagccagcccggcc

SEQ ID NO: 4532 - RNA, 25 nt, Homo sapiens
  source 1..25: mol_type = unassigned RNA
ccttccccgaggaccgcagccagcc

SEQ ID NO: 4533 - RNA, 25 nt, Homo sapiens
  source 1..25: mol_type = unassigned RNA
acggacaagctggccgccttccccg

SEQ ID NO: 4534 - RNA, 25 nt, Homo sapiens
  source 1..25: mol_type = unassigned RNA
agccccagcaaccagacggacaagc

SEQ ID NO: 4535 - RNA, 25 nt, Homo sapiens
  source 1..25: mol_type = unassigned RNA
taccgcatgagccccagcaaccaga

SEQ ID NO: 4536 - RNA, 25 nt, Homo sapiens
  source 1..25: mol_type = unassigned RNA
cacatcggagagcttcgtgctaaac

SEQ ID NO: 4537 - RNA, 25 nt, Homo sapiens
  source 1..25: mol_type = unassigned RNA
ttcacctgcagcttctccaacacat

SEQ ID NO: 4538 - RNA, 25 nt, Homo sapiens
  source 1..25: mol_type = unassigned RNA
ccagccctgctcgtggtgaccgaag

SEQ ID NO: 4539 - RNA, 25 nt, Homo sapiens
  source 1..25: mol_type = unassigned RNA
cccagccctgctcgtggtgaccgaa

SEQ ID NO: 4540 - RNA, 25 nt, Homo sapiens
  source 1..25: mol_type = unassigned RNA
ccccagccctgctcgtggtgaccga

SEQ ID NO: 4541 - RNA, 25 nt, Homo sapiens
  source 1..25: mol_type = unassigned RNA
cccaccttctccccagccctgctcg

SEQ ID NO: 4542 - RNA, 25 nt, Homo sapiens
  source 1..25: mol_type = unassigned RNA
tctctcagactccccagacaggccc

SEQ ID NO: 4543 - RNA, 25 nt, Homo sapiens
  source 1..25: mol_type = unassigned RNA
tctccatctctcagactccccagac

SEQ ID NO: 4544 - RNA, 25 nt, Homo sapiens
  source 1..25: mol_type = unassigned RNA
gaccccacctacctaagaaccatcc

SEQ ID NO: 4545 - RNA, 25 nt, Homo sapiens
  source 1..25: mol_type = unassigned RNA
ccagttgtagcaccgcccagacgac

SEQ ID NO: 4546 - RNA, 25 nt, Homo sapiens
  source 1..25: mol_type = unassigned RNA
tgtagcaccgcccagacgactggcc

SEQ ID NO: 4547 - RNA, 25 nt, Homo sapiens
  source 1..25: mol_type = unassigned RNA
gtagcaccgcccagacgactggcca

SEQ ID NO: 4548 - RNA, 25 nt, Homo sapiens
  source 1..25: mol_type = unassigned RNA
cccagacgactggccagggcgcctg

SEQ ID NO: 4549 - RNA, 25 nt, Homo sapiens
  source 1..25: mol_type = unassigned RNA
ccagacgactggccagggcgcctgt

SEQ ID NO: 4550 - RNA, 25 nt, Homo sapiens
  source 1..25: mol_type = unassigned RNA
agggcgcctgtgggatctgcatgcc

SEQ ID NO: 4551 - RNA, 25 nt, Homo sapiens
  source 1..25: mol_type = unassigned RNA
cagagtgccgccttctccactgctc

SEQ ID NO: 4552 - RNA, 25 nt, Homo sapiens
  source 1..25: mol_type = unassigned RNA
agtgccgccttctccactgctcagg

SEQ ID NO: 4553 - RNA, 25 nt, Homo sapiens
  source 1..25: mol_type = unassigned RNA
gccgccttctccactgctcaggcgg

SEQ ID NO: 4554 - RNA, 25 nt, Homo sapiens
  source 1..25: mol_type = unassigned RNA
tctccactgctcaggcggaggtgag

SEQ ID NO: 4555 - RNA, 25 nt, Homo sapiens
  source 1..25: mol_type = unassigned RNA
cactgctcaggcggaggtgagcgga

SEQ ID NO: 4556 - RNA, 25 nt, Homo sapiens
  source 1..25: mol_type = unassigned RNA
actgctcaggcggaggtgagcggaa

SEQ ID NO: 4557 - RNA, 25 nt, Homo sapiens
  source 1..25: mol_type = unassigned RNA
aggtgagcggaagggaaactgtccc

SEQ ID NO: 4558 - RNA, 25 nt, Homo sapiens
  source 1..25: mol_type = unassigned RNA
agcggaagggaaactgtcccaggtc

SEQ ID NO: 4559 - RNA, 25 nt, Homo sapiens
  source 1..25: mol_type = unassigned RNA
gggaaactgtcccaggtcaggttga

SEQ ID NO: 4560 - RNA, 25 nt, Homo sapiens
  source 1..25: mol_type = unassigned RNA
ggaaactgtcccaggtcaggttgaa

SEQ ID NO: 4561 - RNA, 25 nt, Homo sapiens
  source 1..25: mol_type = unassigned RNA
aactgtcccaggtcaggttgaaggg

SEQ ID NO: 4562 - RNA, 25 nt, Homo sapiens
  source 1..25: mol_type = unassigned RNA
actgtcccaggtcaggttgaaggga

SEQ ID NO: 4563 - RNA, 25 nt, Homo sapiens
  source 1..25: mol_type = unassigned RNA
tcttaggtaggtggggtcggcggtc

SEQ ID NO: 4564 - RNA, 25 nt, Homo sapiens
  source 1..25: mol_type = unassigned RNA
atggttcttaggtaggtggggtcgg

SEQ ID NO: 4565 - RNA, 25 nt, Homo sapiens
  source 1..25: mol_type = unassigned RNA
aggatggttcttaggtaggtggggt

SEQ ID NO: 4566 - RNA, 25 nt, Homo sapiens
  source 1..25: mol_type = unassigned RNA
ggccaggatggttcttaggtaggtg

SEQ ID NO: 4567 - RNA, 25 nt, Homo sapiens
  source 1..25: mol_type = unassigned RNA
cggccaggatggttcttaggtaggt

SEQ ID NO: 4568 - RNA, 25 nt, Homo sapiens
  source 1..25: mol_type = unassigned RNA
gcggccaggatggttcttaggtagg

SEQ ID NO: 4569 - RNA, 25 nt, Homo sapiens
  source 1..25: mol_type = unassigned RNA
ctggcggccaggatggttcttaggt

SEQ ID NO: 4570 - RNA, 25 nt, Homo sapiens
  source 1..25: mol_type = unassigned RNA
tgggctggcggccaggatggttctt

SEQ ID NO: 4571 - RNA, 25 nt, Homo sapiens
  source 1..25: mol_type = unassigned RNA
gctacaactgggctggcggccagga

SEQ ID NO: 4572 - RNA, 25 nt, Homo sapiens
  source 1..25: mol_type = unassigned RNA
cggtgctacaactgggctggcggcc

SEQ ID NO: 4573 - RNA, 25 nt, Homo sapiens
  source 1..25: mol_type = unassigned RNA
ctgggcggtgctacaactgggctgg

SEQ ID NO: 4574 - RNA, 25 nt, Homo sapiens
  source 1..25: mol_type = unassigned RNA
cgtctgggcggtgctacaactgggc

SEQ ID NO: 4575 - RNA, 25 nt, Homo sapiens
  source 1..25: mol_type = unassigned RNA
cagtcgtctgggcggtgctacaact

SEQ ID NO: 4576 - RNA, 25 nt, Homo sapiens
  source 1..25: mol_type = unassigned RNA
ccagtcgtctgggcggtgctacaac

SEQ ID NO: 4577 - RNA, 25 nt, Homo sapiens
  source 1..25: mol_type = unassigned RNA
caggcgccctggccagtcgtctggg

SEQ ID NO: 4578 - RNA, 25 nt, Homo sapiens
  source 1..25: mol_type = unassigned RNA
ccacaggcgccctggccagtcgtct

SEQ ID NO: 4579 - RNA, 25 nt, Homo sapiens
  source 1..25: mol_type = unassigned RNA
cccacaggcgccctggccagtcgtc

SEQ ID NO: 4580 - RNA, 25 nt, Homo sapiens
  source 1..25: mol_type = unassigned RNA
aggcatgcagatcccacaggcgccc

SEQ ID NO: 4581 - RNA, 25 nt, Homo sapiens
  source 1..25: mol_type = unassigned RNA
gctgctccaggcatgcagatcccac

SEQ ID NO: 4582 - RNA, 25 nt, Homo sapiens
  source 1..25: mol_type = unassigned RNA
ggcggcactctggtggggctgctcc

SEQ ID NO: 4583 - RNA, 25 nt, Homo sapiens
  source 1..25: mol_type = unassigned RNA
cagtggagaaggcggcactctggtg

SEQ ID NO: 4584 - RNA, 25 nt, Homo sapiens
  source 1..25: mol_type = unassigned RNA
gcagtggagaaggcggcactctggt

SEQ ID NO: 4585 - RNA, 25 nt, Homo sapiens
  source 1..25: mol_type = unassigned RNA
agcagtggagaaggcggcactctgg

SEQ ID NO: 4586 - RNA, 25 nt, Homo sapiens
  source 1..25: mol_type = unassigned RNA
ctgagcagtggagaaggcggcactc

SEQ ID NO: 4587 - RNA, 25 nt, Homo sapiens
  source 1..25: mol_type = unassigned RNA
acctccgcctgagcagtggagaagg

SEQ ID NO: 4588 - RNA, 25 nt, Homo sapiens
  source 1..25: mol_type = unassigned RNA
ctcacctccgcctgagcagtggaga

SEQ ID NO: 4589 - RNA, 25 nt, Homo sapiens
  source 1..25: mol_type = unassigned RNA
cttccgctcacctccgcctgagcag

SEQ ID NO: 4590 - RNA, 25 nt, Homo sapiens
  source 1..25: mol_type = unassigned RNA
cgcggagcgcgcagctcacacctgg

SEQ ID NO: 4591 - RNA, 25 nt, Homo sapiens
  source 1..25: mol_type = unassigned RNA
gcgcgcagctcacacctggcggccg

SEQ ID NO: 4592 - RNA, 25 nt, Homo sapiens
  source 1..25: mol_type = unassigned RNA
ctcacacctggcggccgcggtttcc

SEQ ID NO: 4593 - RNA, 25 nt, Homo sapiens
  source 1..25: mol_type = unassigned RNA
acacctggcggccgcggtttccagg

SEQ ID NO: 4594 - RNA, 25 nt, Homo sapiens
  source 1..25: mol_type = unassigned RNA
cggccgcggtttccaggaggaagca

SEQ ID NO: 4595 - RNA, 25 nt, Homo sapiens
  source 1..25: mol_type = unassigned RNA
tttccaggaggaagcaaggatgctt

SEQ ID NO: 4596 - RNA, 25 nt, Homo sapiens
  source 1..25: mol_type = unassigned RNA
gcaaggatgctttggacactgtgcg

SEQ ID NO: 4597 - RNA, 25 nt, Homo sapiens
  source 1..25: mol_type = unassigned RNA
ttggacactgtgcgtggcgcctccg

SEQ ID NO: 4598 - RNA, 25 nt, Homo sapiens
  source 1..25: mol_type = unassigned RNA
cgcggagcccccgcgctgccattcc

SEQ ID NO: 4599 - RNA, 25 nt, Homo sapiens
  source 1..25: mol_type = unassigned RNA
cgcgctgccattcccggccgtcgct

SEQ ID NO: 4600 - RNA, 25 nt, Homo sapiens
  source 1..25: mol_type = unassigned RNA
cggccgtcgctcggtcctccgctga

SEQ ID NO: 4601 - RNA, 25 nt, Homo sapiens
  source 1..25: mol_type = unassigned RNA
ggccgtcgctcggtcctccgctgac

SEQ ID NO: 4602 - RNA, 25 nt, Homo sapiens
  source 1..25: mol_type = unassigned RNA
gctcggtcctccgctgacgggaagc

SEQ ID NO: 4603 - RNA, 25 nt, Homo sapiens
  source 1..25: mol_type = unassigned RNA
ggccggggggcagctgcacagtctc

SEQ ID NO: 4604 - RNA, 25 nt, Homo sapiens
  source 1..25: mol_type = unassigned RNA
gccggggggcagctgcacagtctcc

SEQ ID NO: 4605 - RNA, 25 nt, Homo sapiens
  source 1..25: mol_type = unassigned RNA
cagctgcacagtctccgggatcccc

SEQ ID NO: 4606 - RNA, 25 nt, Homo sapiens
  source 1..25: mol_type = unassigned RNA
gcacagtctccgggatccccaggcc

SEQ ID NO: 4607 - RNA, 25 nt, Homo sapiens
  source 1..25: mol_type = unassigned RNA
cagtctccgggatccccaggcctgg

SEQ ID NO: 4608 - RNA, 25 nt, Homo sapiens
  source 1..25: mol_type = unassigned RNA
agtctccgggatccccaggcctgga

SEQ ID NO: 4609 - RNA, 25 nt, Homo sapiens
  source 1..25: mol_type = unassigned RNA
gtctccgggatccccaggcctggag

SEQ ID NO: 4610 - RNA, 25 nt, Homo sapiens
  source 1..25: mol_type = unassigned RNA
tctccgggatccccaggcctggagg

SEQ ID NO: 4611 - RNA, 25 nt, Homo sapiens
  source 1..25: mol_type = unassigned RNA
ctccgggatccccaggcctggaggg

SEQ ID NO: 4612 - RNA, 25 nt, Homo sapiens
  source 1..25: mol_type = unassigned RNA
ccaggcctggaggggggtctgtgcg

SEQ ID NO: 4613 - RNA, 25 nt, Homo sapiens
  source 1..25: mol_type = unassigned RNA
gcctggaggggggtctgtgcgcggc

SEQ ID NO: 4614 - RNA, 25 nt, Homo sapiens
  source 1..25: mol_type = unassigned RNA
ggaggggggtctgtgcgcggccggc

SEQ ID NO: 4615 - RNA, 25 nt, Homo sapiens
  source 1..25: mol_type = unassigned RNA
cggccggctggctctgccccgcgtc

SEQ ID NO: 4616 - RNA, 25 nt, Homo sapiens
  source 1..25: mol_type = unassigned RNA
gctctgccccgcgtccggtcccgag

SEQ ID NO: 4617 - RNA, 25 nt, Homo sapiens
  source 1..25: mol_type = unassigned RNA
ctctgccccgcgtccggtcccgagc

SEQ ID NO: 4618 - RNA, 25 nt, Homo sapiens
  source 1..25: mol_type = unassigned RNA
cgtccggtcccgagcgggcctccct

SEQ ID NO: 4619 - RNA, 25 nt, Homo sapiens
  source 1..25: mol_type = unassigned RNA
gtccggtcccgagcgggcctccctc

SEQ ID NO: 4620 - RNA, 25 nt, Homo sapiens
  source 1..25: mol_type = unassigned RNA
gccagcccgatgtgaccgagcccag

SEQ ID NO: 4621 - RNA, 25 nt, Homo sapiens
  source 1..25: mol_type = unassigned RNA
gaccgagcccagcggagcctgagca

SEQ ID NO: 4622 - RNA, 25 nt, Homo sapiens
  source 1..25: mol_type = unassigned RNA
agcccagcggagcctgagcaaggag

SEQ ID NO: 4623 - RNA, 25 nt, Homo sapiens
  source 1..25: mol_type = unassigned RNA
gcccagcggagcctgagcaaggagc

SEQ ID NO: 4624 - RNA, 25 nt, Homo sapiens
  source 1..25: mol_type = unassigned RNA
gcctgagcaaggagcgggtccgtcg

SEQ ID NO: 4625 - RNA, 25 nt, Homo sapiens
  source 1..25: mol_type = unassigned RNA
gcaaggagcgggtccgtcgcggagc

SEQ ID NO: 4626 - RNA, 25 nt, Homo sapiens
  source 1..25: mol_type = unassigned RNA
aggagcgggtccgtcgcggagccgg

SEQ ID NO: 4627 - RNA, 25 nt, Homo sapiens
  source 1..25: mol_type = unassigned RNA
ggagcgggtccgtcgcggagccgga

SEQ ID NO: 4628 - RNA, 25 nt, Homo sapiens
  source 1..25: mol_type = unassigned RNA
gcgggtccgtcgcggagccggaggg

SEQ ID NO: 4629 - RNA, 25 nt, Homo sapiens
  source 1..25: mol_type = unassigned RNA
cgggtccgtcgcggagccggagggc

SEQ ID NO: 4630 - RNA, 25 nt, Homo sapiens
  source 1..25: mol_type = unassigned RNA
gtccgtcgcggagccggagggcggg

SEQ ID NO: 4631 - RNA, 25 nt, Homo sapiens
  source 1..25: mol_type = unassigned RNA
ggagggcgggaggaacatgacatcg

SEQ ID NO: 4632 - RNA, 25 nt, Homo sapiens
  source 1..25: mol_type = unassigned RNA
gggcgggaggaacatgacatcgcgg

SEQ ID NO: 4633 - RNA, 25 nt, Homo sapiens
  source 1..25: mol_type = unassigned RNA
ggaggaacatgacatcgcggaggtg

SEQ ID NO: 4634 - RNA, 25 nt, Homo sapiens
  source 1..25: mol_type = unassigned RNA
gacatcgcggaggtgaggagccccg

SEQ ID NO: 4635 - RNA, 25 nt, Homo sapiens
  source 1..25: mol_type = unassigned RNA
acatcgcggaggtgaggagccccga

SEQ ID NO: 4636 - RNA, 25 nt, Homo sapiens
  source 1..25: mol_type = unassigned RNA
catcgcggaggtgaggagccccgag

SEQ ID NO: 4637 - RNA, 25 nt, Homo sapiens
  source 1..25: mol_type = unassigned RNA
cggaggtgaggagccccgaggggcc

SEQ ID NO: 4638 - RNA, 25 nt, Homo sapiens
  source 1..25: mol_type = unassigned RNA
cttcctcctggaaaccgcggccgcc

SEQ ID NO: 4639 - RNA, 25 nt, Homo sapiens
  source 1..25: mol_type = unassigned RNA
catccttgcttcctcctggaaaccg

SEQ ID NO: 4640 - RNA, 25 nt, Homo sapiens
  source 1..25: mol_type = unassigned RNA
tgtccaaagcatccttgcttcctcc

SEQ ID NO: 4641 - RNA, 25 nt, Homo sapiens
  source 1..25: mol_type = unassigned RNA
gaatggcagcgcgggggctccgcgg

SEQ ID NO: 4642 - RNA, 25 nt, Homo sapiens
  source 1..25: mol_type = unassigned RNA
cgggaatggcagcgcgggggctccg

SEQ ID NO: 4643 - RNA, 25 nt, Homo sapiens
  source 1..25: mol_type = unassigned RNA
gcgacggccgggaatggcagcgcgg

SEQ ID NO: 4644 - RNA, 25 nt, Homo sapiens
  source 1..25: mol_type = unassigned RNA
agcgacggccgggaatggcagcgcg

SEQ ID NO: 4645 - RNA, 25 nt, Homo sapiens
  source 1..25: mol_type = unassigned RNA
gagcgacggccgggaatggcagcgc

SEQ ID NO: 4646 - RNA, 25 nt, Homo sapiens
  source 1..25: mol_type = unassigned RNA
cgagcgacggccgggaatggcagcg

SEQ ID NO: 4647 - RNA, 25 nt, Homo sapiens
  source 1..25: mol_type = unassigned RNA
cggaggaccgagcgacggccgggaa

SEQ ID NO: 4648 - RNA, 25 nt, Homo sapiens
  source 1..25: mol_type = unassigned RNA
gtcagcggaggaccgagcgacggcc

SEQ ID NO: 4649 - RNA, 25 nt, Homo sapiens
  source 1..25: mol_type = unassigned RNA
cgtcagcggaggaccgagcgacggc

SEQ ID NO: 4650 - RNA, 25 nt, Homo sapiens
  source 1..25: mol_type = unassigned RNA
ttcccgtcagcggaggaccgagcga

SEQ ID NO: 4651 - RNA, 25 nt, Homo sapiens
  source 1..25: mol_type = unassigned RNA
cggacttcctgcttcccgtcagcgg

SEQ ID NO: 4652 - RNA, 25 nt, Homo sapiens
  source 1..25: mol_type = unassigned RNA
cggcggacttcctgcttcccgtcag

SEQ ID NO: 4653 - RNA, 25 nt, Homo sapiens
  source 1..25: mol_type = unassigned RNA
gacccccctccaggcctggggatcc

SEQ ID NO: 4654 - RNA, 25 nt, Homo sapiens
  source 1..25: mol_type = unassigned RNA
gcgcacagacccccctccaggcctg

SEQ ID NO: 4655 - RNA, 25 nt, Homo sapiens
  source 1..25: mol_type = unassigned RNA
cgcgcacagacccccctccaggcct

SEQ ID NO: 4656 - RNA, 25 nt, Homo sapiens
  source 1..25: mol_type = unassigned RNA
ccgcgcacagacccccctccaggcc

SEQ ID NO: 4657 - RNA, 25 nt, Homo sapiens
  source 1..25: mol_type = unassigned RNA
gccggccgcgcacagacccccctcc

SEQ ID NO: 4658 - RNA, 25 nt, Homo sapiens
  source 1..25: mol_type = unassigned RNA
ggaccggacgcggggcagagccagc

SEQ ID NO: 4659 - RNA, 25 nt, Homo sapiens
  source 1..25: mol_type = unassigned RNA
ggaggcccgctcgggaccggacgcg

SEQ ID NO: 4660 - RNA, 25 nt, Homo sapiens
  source 1..25: mol_type = unassigned RNA
gggaggcccgctcgggaccggacgc

SEQ ID NO: 4661 - RNA, 25 nt, Homo sapiens
  source 1..25: mol_type = unassigned RNA
agggaggcccgctcgggaccggacg

SEQ ID NO: 4662 - RNA, 25 nt, Homo sapiens
  source 1..25: mol_type = unassigned RNA
ggcccgagggaggcccgctcgggac

SEQ ID NO: 4663 - RNA, 25 nt, Homo sapiens
  source 1..25: mol_type = unassigned RNA
gggctggcccgagggaggcccgctc

SEQ ID NO: 4664 - RNA, 25 nt, Homo sapiens
  source 1..25: mol_type = unassigned RNA
cgggctggcccgagggaggcccgct

SEQ ID NO: 4665 - RNA, 25 nt, Homo sapiens
  source 1..25: mol_type = unassigned RNA
cggtcacatcgggctggcccgaggg

SEQ ID NO: 4666 - RNA, 25 nt, Homo sapiens
  source 1..25: mol_type = unassigned RNA
gctcggtcacatcgggctggcccga

SEQ ID NO: 4667 - RNA, 25 nt, Homo sapiens
  source 1..25: mol_type = unassigned RNA
ggctcggtcacatcgggctggcccg

SEQ ID NO: 4668 - RNA, 25 nt, Homo sapiens
  source 1..25: mol_type = unassigned RNA
tccgctgggctcggtcacatcgggc

SEQ ID NO: 4669 - RNA, 25 nt, Homo sapiens
  source 1..25: mol_type = unassigned RNA
aggctccgctgggctcggtcacatc

SEQ ID NO: 4670 - RNA, 25 nt, Homo sapiens
  source 1..25: mol_type = unassigned RNA
caggctccgctgggctcggtcacat

SEQ ID NO: 4671 - RNA, 25 nt, Homo sapiens
  source 1..25: mol_type = unassigned RNA
ctccttgctcaggctccgctgggct

SEQ ID NO: 4672 - RNA, 25 nt, Homo sapiens
  source 1..25: mol_type = unassigned RNA
acccgctccttgctcaggctccgct

SEQ ID NO: 4673 - RNA, 25 nt, Homo sapiens
  source 1..25: mol_type = unassigned RNA
gacccgctccttgctcaggctccgc

SEQ ID NO: 4674 - RNA, 25 nt, Homo sapiens
  source 1..25: mol_type = unassigned RNA
tccgcgacggacccgctccttgctc

SEQ ID NO: 4675 - RNA, 25 nt, Homo sapiens
  source 1..25: mol_type = unassigned RNA
ttcctcccgccctccggctccgcga

SEQ ID NO: 4676 - RNA, 25 nt, Homo sapiens
  source 1..25: mol_type = unassigned RNA
gcgatgtcatgttcctcccgccctc

SEQ ID NO: 4677 - RNA, 25 nt, Homo sapiens
  source 1..25: mol_type = unassigned RNA
acttactttgtctttctttttaaga

SEQ ID NO: 4678 - RNA, 25 nt, Homo sapiens
  source 1..25: mol_type = unassigned RNA
taagatggtttcacccaaatatcac

SEQ ID NO: 4679 - RNA, 25 nt, Homo sapiens
  source 1..25: mol_type = unassigned RNA
tggtttcacccaaatatcactggtg

SEQ ID NO: 4680 - RNA, 25 nt, Homo sapiens
  source 1..25: mol_type = unassigned RNA
tttcacccaaatatcactggtgtgg

SEQ ID NO: 4681 - RNA, 25 nt, Homo sapiens
  source 1..25: mol_type = unassigned RNA
aggcagaaaacctactgttgacaag

SEQ ID NO: 4682 - RNA, 25 nt, Homo sapiens
  source 1..25: mol_type = unassigned RNA
acctactgttgacaagaggagttga

SEQ ID NO: 4683 - RNA, 25 nt, Homo sapiens
  source 1..25: mol_type = unassigned RNA
acaagaggagttgatggcagttttt

SEQ ID NO: 4684 - RNA, 25 nt, Homo sapiens
  source 1..25: mol_type = unassigned RNA
aggagttgatggcagttttttggca

SEQ ID NO: 4685 - RNA, 25 nt, Homo sapiens
  source 1..25: mol_type = unassigned RNA
tggcaaggcctagtaaaagtaaccc

SEQ ID NO: 4686 - RNA, 25 nt, Homo sapiens
  source 1..25: mol_type = unassigned RNA
ccctggagacttcacactttccgtt

SEQ ID NO: 4687 - RNA, 25 nt, Homo sapiens
  source 1..25: mol_type = unassigned RNA
acttcacactttccgttaggtaagt

SEQ ID NO: 4688 - RNA, 25 nt, Homo sapiens
  source 1..25: mol_type = unassigned RNA
gttaggtaagttggaatgaaaagag

SEQ ID NO: 4689 - RNA, 25 nt, Homo sapiens
  source 1..25: mol_type = unassigned RNA
ttctgcctccacaccagtgatattt

SEQ ID NO: 4690 - RNA, 25 nt, Homo sapiens
  source 1..25: mol_type = unassigned RNA
tttctgcctccacaccagtgatatt

SEQ ID NO: 4691 - RNA, 25 nt, Homo sapiens
  source 1..25: mol_type = unassigned RNA
gccatcaactcctcttgtcaacagt

SEQ ID NO: 4692 - RNA, 25 nt, Homo sapiens
  source 1..25: mol_type = unassigned RNA
tgaagtctccagggttacttttact

SEQ ID NO: 4693 - RNA, 25 nt, Homo sapiens
  source 1..25: mol_type = unassigned RNA
cctaacggaaagtgtgaagtctcca

SEQ ID NO: 4694 - RNA, 25 nt, Homo sapiens
  source 1..25: mol_type = unassigned RNA
acctaacggaaagtgtgaagtctcc

SEQ ID NO: 4695 - RNA, 25 nt, Homo sapiens
  source 1..25: mol_type = unassigned RNA
tctcttttcattccaacttacctaa

SEQ ID NO: 4696 - RNA, 25 nt, Homo sapiens
  source 1..25: mol_type = unassigned RNA
ttccaatggactattttagaagaaa

SEQ ID NO: 4697 - RNA, 25 nt, Homo sapiens
  source 1..25: mol_type = unassigned RNA
tcacccacatcaagattcagaacac

SEQ ID NO: 4698 - RNA, 25 nt, Homo sapiens
  source 1..25: mol_type = unassigned RNA
acactggtgattactatgacctgta

SEQ ID NO: 4699 - RNA, 25 nt, Homo sapiens
  source 1..25: mol_type = unassigned RNA
ctggtgattactatgacctgtatgg

SEQ ID NO: 4700 - RNA, 25 nt, Homo sapiens
  source 1..25: mol_type = unassigned RNA
tggtgattactatgacctgtatgga

SEQ ID NO: 4701 - RNA, 25 nt, Homo sapiens
  source 1..25: mol_type = unassigned RNA
ggtgattactatgacctgtatggag

SEQ ID NO: 4702 - RNA, 25 nt, Homo sapiens
  source 1..25: mol_type = unassigned RNA
tatggaggggagaaatttgccactt

SEQ ID NO: 4703 - RNA, 25 nt, Homo sapiens
  source 1..25: mol_type = unassigned RNA
gagaaatttgccactttggctgagt

SEQ ID NO: 4704 - RNA, 25 nt, Homo sapiens
  source 1..25: mol_type = unassigned RNA
ttggctgagttggtccagtattaca

SEQ ID NO: 4705 - RNA, 25 nt, Homo sapiens
  source 1..25: mol_type = unassigned RNA
tggtccagtattacatggaacatca

SEQ ID NO: 4706 - RNA, 25 nt, Homo sapiens
  source 1..25: mol_type = unassigned RNA
ggtccagtattacatggaacatcac

SEQ ID NO: 4707 - RNA, 25 nt, Homo sapiens
  source 1..25: mol_type = unassigned RNA
atcacgggcaattaaaagagaagaa

SEQ ID NO: 4708 - RNA, 25 nt, Homo sapiens
  source 1..25: mol_type = unassigned RNA
gaactgtgcagatcctacctctgaa

SEQ ID NO: 4709 - RNA, 25 nt, Homo sapiens
  source 1..25: mol_type = unassigned RNA
ttcttctaaaatagtccattggaaa

SEQ ID NO: 4710 - RNA, 25 nt, Homo sapiens
  source 1..25: mol_type = unassigned RNA
tttcttctaaaatagtccattggaa

SEQ ID NO: 4711 - RNA, 25 nt, Homo sapiens
  source 1..25: mol_type = unassigned RNA
ctccatttcttctaaaatagtccat

SEQ ID NO: 4712 - RNA, 25 nt, Homo sapiens
  source 1..25: mol_type = unassigned RNA
tcaccagtgttctgaatcttgatgt

SEQ ID NO: 4713 - RNA, 25 nt, Homo sapiens
  source 1..25: mol_type = unassigned RNA
atcaccagtgttctgaatcttgatg

SEQ ID NO: 4714 - RNA, 25 nt, Homo sapiens
  source 1..25: mol_type = unassigned RNA
agtggcaaatttctcccctccatac

SEQ ID NO: 4715 - RNA, 25 nt, Homo sapiens
  source 1..25: mol_type = unassigned RNA
taatactggaccaactcagccaaag

SEQ ID NO: 4716 - RNA, 25 nt, Homo sapiens
  source 1..25: mol_type = unassigned RNA
ttgcccgtgatgttccatgtaatac

SEQ ID NO: 4717 - RNA, 25 nt, Homo sapiens
  source 1..25: mol_type = unassigned RNA
cagaggtaggatctgcacagttcag

SEQ ID NO: 4718 - RNA, 25 nt, Homo sapiens
  source 1..25: mol_type = unassigned RNA
aaaatgttactgacctttcagaggt

SEQ ID NO: 4719 - RNA, 25 nt, Homo sapiens
  source 1..25: mol_type = unassigned RNA
cactaaaatgttactgacctttcag

SEQ ID NO: 4720 - RNA, 25 nt, Homo sapiens
  source 1..25: mol_type = unassigned RNA
ttttttattttttaaaaactttagg

SEQ ID NO: 4721 - RNA, 25 nt, Homo sapiens
  source 1..25: mol_type = unassigned RNA
tttttaaaaactttaggtggtttca

SEQ ID NO: 4722 - RNA, 25 nt, Homo sapiens
  source 1..25: mol_type = unassigned RNA
ttaggtggtttcatggacatctctc

SEQ ID NO: 4723 - RNA, 25 nt, Homo sapiens
  source 1..25: mol_type = unassigned RNA
taggtggtttcatggacatctctct

SEQ ID NO: 4724 - RNA, 25 nt, Homo sapiens
  source 1..25: mol_type = unassigned RNA
aagcagagaaattattaactgaaaa

SEQ ID NO: 4725 - RNA, 25 nt, Homo sapiens
  source 1..25: mol_type = unassigned RNA
aattattaactgaaaaaggaaaaca

SEQ ID NO: 4726 - RNA, 25 nt, Homo sapiens
  source 1..25: mol_type = unassigned RNA
ttgtacgagagagccagagccaccc

SEQ ID NO: 4727 - RNA, 25 nt, Homo sapiens
  source 1..25: mol_type = unassigned RNA
gagattttgttctttctgtgcgcac

SEQ ID NO: 4728 - RNA, 25 nt, Homo sapiens
  source 1..25: mol_type = unassigned RNA
tttctgtgcgcactggtgatgacaa

SEQ ID NO: 4729 - RNA, 25 nt, Homo sapiens
  source 1..25: mol_type = unassigned RNA
ttctgtgcgcactggtgatgacaaa

SEQ ID NO: 4730 - RNA, 25 nt, Homo sapiens
  source 1..25: mol_type = unassigned RNA
tctgtgcgcactggtgatgacaaag

SEQ ID NO: 4731 - RNA, 25 nt, Homo sapiens
  source 1..25: mol_type = unassigned RNA
gtgatgacaaaggggagagcaatga

SEQ ID NO: 4732 - RNA, 25 nt, Homo sapiens
  source 1..25: mol_type = unassigned RNA
gtgacccatgttatgattcgctgtc

SEQ ID NO: 4733 - RNA, 25 nt, Homo sapiens
  source 1..25: mol_type = unassigned RNA
gtcaggtaaatctccagttgaaaaa

SEQ ID NO: 4734 - RNA, 25 nt, Homo sapiens
  source 1..25: mol_type = unassigned RNA
tcaggtaaatctccagttgaaaaat

SEQ ID NO: 4735 - RNA, 25 nt, Homo sapiens
  source 1..25: mol_type = unassigned RNA
aagaacaaaatctccagggtggctc

SEQ ID NO: 4736 - RNA, 25 nt, Homo sapiens
  source 1..25: mol_type = unassigned RNA
cacagaaagaacaaaatctccaggg

SEQ ID NO: 4737 - RNA, 25 nt, Homo sapiens
  source 1..25: mol_type = unassigned RNA
gcgcacagaaagaacaaaatctcca

SEQ ID NO: 4738 - RNA, 25 nt, Homo sapiens
  source 1..25: mol_type = unassigned RNA
tgcgcacagaaagaacaaaatctcc

SEQ ID NO: 4739 - RNA, 25 nt, Homo sapiens
  source 1..25: mol_type = unassigned RNA
tttacctgacagcgaatcataacat

SEQ ID NO: 4740 - RNA, 25 nt, Homo sapiens
  source 1..25: mol_type = unassigned RNA
atttacctgacagcgaatcataaca

SEQ ID NO: 4741 - RNA, 25 nt, Homo sapiens
  source 1..25: mol_type = unassigned RNA
cttgaaaggaactgaaatacgacgt

SEQ ID NO: 4742 - RNA, 25 nt, Homo sapiens
  source 1..25: mol_type = unassigned RNA
gaaaggaactgaaatacgacgttgg

SEQ ID NO: 4743 - RNA, 25 nt, Homo sapiens
  source 1..25: mol_type = unassigned RNA
aggaactgaaatacgacgttggtgg

SEQ ID NO: 4744 - RNA, 25 nt, Homo sapiens
  source 1..25: mol_type = unassigned RNA
gaaatacgacgttggtggaggagaa

SEQ ID NO: 4745 - RNA, 25 nt, Homo sapiens
  source 1..25: mol_type = unassigned RNA
cggtttgattctttgacagatcttg

SEQ ID NO: 4746 - RNA, 25 nt, Homo sapiens
  source 1..25: mol_type = unassigned RNA
gtggaacattataagaagaatccta

SEQ ID NO: 4747 - RNA, 25 nt, Homo sapiens
  source 1..25: mol_type = unassigned RNA
gaacattataagaagaatcctatgg

SEQ ID NO: 4748 - RNA, 25 nt, Homo sapiens
  source 1..25: mol_type = unassigned RNA
aagaagaatcctatggtggaaacat

SEQ ID NO: 4749 - RNA, 25 nt, Homo sapiens
  source 1..25: mol_type = unassigned RNA
agaagaatcctatggtggaaacatt

SEQ ID NO: 4750 - RNA, 25 nt, Homo sapiens
  source 1..25: mol_type = unassigned RNA
ttgggtacagtactacaactcaagc

SEQ ID NO: 4751 - RNA, 25 nt, Homo sapiens
  source 1..25: mol_type = unassigned RNA
ctacaactcaagcaggtgagcagat

SEQ ID NO: 4752 - RNA, 25 nt, Homo sapiens
  source 1..25: mol_type = unassigned RNA
gtactgtacccaatgtttccaccat

SEQ ID NO: 4753 - RNA, 25 nt, Homo sapiens
  source 1..25: mol_type = unassigned RNA
ctgagaccacagataaagtcaaaca

SEQ ID NO: 4754 - RNA, 25 nt, Homo sapiens
  source 1..25: mol_type = unassigned RNA
cacagataaagtcaaacaaggcttt

SEQ ID NO: 4755 - RNA, 25 nt, Homo sapiens
  source 1..25: mol_type = unassigned RNA
acagataaagtcaaacaaggctttt

SEQ ID NO: 4756 - RNA, 25 nt, Homo sapiens
  source 1..25: mol_type = unassigned RNA
aaacaaggcttttgggaagaatttg

SEQ ID NO: 4757 - RNA, 25 nt, Homo sapiens
  source 1..25: mol_type = unassigned RNA
cagcatttatacgagtcgtgttaag

SEQ ID NO: 4758 - RNA, 25 nt, Homo sapiens
  source 1..25: mol_type = unassigned RNA
gcagcatttatacgagtcgtgttaa

SEQ ID NO: 4759 - RNA, 25 nt, Homo sapiens
  source 1..25: mol_type = unassigned RNA
agcagcatttatacgagtcgtgtta

SEQ ID NO: 4760 - RNA, 25 nt, Homo sapiens
  source 1..25: mol_type = unassigned RNA
caaaagccttgtttgactttatctg

SEQ ID NO: 4761 - RNA, 25 nt, Homo sapiens
  source 1..25: mol_type = unassigned RNA
ctttctttccagacactacaacaac

SEQ ID NO: 4762 - RNA, 25 nt, Homo sapiens
  source 1..25: mol_type = unassigned RNA
tgcaaacttctctacagccgaaaag

SEQ ID NO: 4763 - RNA, 25 nt, Homo sapiens
  source 1..25: mol_type = unassigned RNA
gcaaacttctctacagccgaaaaga

SEQ ID NO: 4764 - RNA, 25 nt, Homo sapiens
  source 1..25: mol_type = unassigned RNA
tctctacagccgaaaagagggtcaa

SEQ ID NO: 4765 - RNA, 25 nt, Homo sapiens
  source 1..25: mol_type = unassigned RNA
tttgcactcctgttgttgtagtgtc

SEQ ID NO: 4766 - RNA, 25 nt, Homo sapiens
  source 1..25: mol_type = unassigned RNA
gttttcttgcctttgaccctctttt

SEQ ID NO: 4767 - RNA, 25 nt, Homo sapiens
  source 1..25: mol_type = unassigned RNA
agcggaatattgatacttacagggc

SEQ ID NO: 4768 - RNA, 25 nt, Homo sapiens
  source 1..25: mol_type = unassigned RNA
actgagcggaatattgatacttaca

SEQ ID NO: 4769 - RNA, 25 nt, Homo sapiens
  source 1..25: mol_type = unassigned RNA
tactgagcggaatattgatacttac

SEQ ID NO: 4770 - RNA, 25 nt, Homo sapiens
  source 1..25: mol_type = unassigned RNA
tctttttcttctagttgatcatacc

SEQ ID NO: 4771 - RNA, 25 nt, Homo sapiens
  source 1..25: mol_type = unassigned RNA
ctttttcttctagttgatcatacca

SEQ ID NO: 4772 - RNA, 25 nt, Homo sapiens
  source 1..25: mol_type = unassigned RNA
atcataccagggttgtcctacacga

SEQ ID NO: 4773 - RNA, 25 nt, Homo sapiens
  source 1..25: mol_type = unassigned RNA
gattacatcaatgcaaatatcatca

SEQ ID NO: 4774 - RNA, 25 nt, Homo sapiens
  source 1..25: mol_type = unassigned RNA
gatcaactagaagaaaaagagacca

SEQ ID NO: 4775 - RNA, 25 nt, Homo sapiens
  source 1..25: mol_type = unassigned RNA
ggatcaccatcgtgtaggacaaccc

SEQ ID NO: 4776 - RNA, 25 nt, Homo sapiens
  source 1..25: mol_type = unassigned RNA
aggctcattgggatcaccatcgtgt

SEQ ID NO: 4777 - RNA, 25 nt, Homo sapiens
  source 1..25: mol_type = unassigned RNA
tgatgtaatctgaaacaggctcatt

SEQ ID NO: 4778 - RNA, 25 nt, Homo sapiens
  source 1..25: mol_type = unassigned RNA
ttgatgtaatctgaaacaggctcat

SEQ ID NO: 4779 - RNA, 25 nt, Homo sapiens
  source 1..25: mol_type = unassigned RNA
tatttgcattgatgtaatctgaaac

SEQ ID NO: 4780 - RNA, 25 nt, Homo sapiens
  source 1..25: mol_type = unassigned RNA
ccaaaaagagttacattgccacaca

SEQ ID NO: 4781 - RNA, 25 nt, Homo sapiens
  source 1..25: mol_type = unassigned RNA
gccacacaaggctgcctgcaaaaca

SEQ ID NO: 4782 - RNA, 25 nt, Homo sapiens
  source 1..25: mol_type = unassigned RNA
cctgcaaaacacggtgaatgacttt

SEQ ID NO: 4783 - RNA, 25 nt, Homo sapiens
  source 1..25: mol_type = unassigned RNA
gcaaaacacggtgaatgacttttgg

SEQ ID NO: 4784 - RNA, 25 nt, Homo sapiens
  source 1..25: mol_type = unassigned RNA
aacacggtgaatgacttttggcgga

SEQ ID NO: 4785 - RNA, 25 nt, Homo sapiens
  source 1..25: mol_type = unassigned RNA
gtgattgtcatgacaacgaaagaag

SEQ ID NO: 4786 - RNA, 25 nt, Homo sapiens
  source 1..25: mol_type = unassigned RNA
tcatgacaacgaaagaagtggagag

SEQ ID NO: 4787 - RNA, 25 nt, Homo sapiens
  source 1..25: mol_type = unassigned RNA
acaacgaaagaagtggagagaggaa

SEQ ID NO: 4788 - RNA, 25 nt, Homo sapiens
  source 1..25: mol_type = unassigned RNA
ggtttcaaattcaggctagaaattt

SEQ ID NO: 4789 - RNA, 25 nt, Homo sapiens
  source 1..25: mol_type = unassigned RNA
aattgttgcacttggtttcaaattc

SEQ ID NO: 4790 - RNA, 25 nt, Homo sapiens
  source 1..25: mol_type = unassigned RNA
tttttgggctttgaattgttgcact

SEQ ID NO: 4791 - RNA, 25 nt, Homo sapiens
  source 1..25: mol_type = unassigned RNA
cttgtgtggcaatgtaactcttttt

SEQ ID NO: 4792 - RNA, 25 nt, Homo sapiens
  source 1..25: mol_type = unassigned RNA
ccttgtgtggcaatgtaactctttt

SEQ ID NO: 4793 - RNA, 25 nt, Homo sapiens
  source 1..25: mol_type = unassigned RNA
accgtgttttgcaggcagccttgtg

SEQ ID NO: 4794 - RNA, 25 nt, Homo sapiens
  source 1..25: mol_type = unassigned RNA
ccaaaagtcattcaccgtgttttgc

SEQ ID NO: 4795 - RNA, 25 nt, Homo sapiens
  source 1..25: mol_type = unassigned RNA
catgacaatcactcgggagttttct

SEQ ID NO: 4796 - RNA, 25 nt, Homo sapiens
  source 1..25: mol_type = unassigned RNA
tctttcgttgtcatgacaatcactc

SEQ ID NO: 4797 - RNA, 25 nt, Homo sapiens
  source 1..25: mol_type = unassigned RNA
ttctttcgttgtcatgacaatcact

SEQ ID NO: 4798 - RNA, 25 nt, Homo sapiens
  source 1..25: mol_type = unassigned RNA
cttccagagtaaatgtgtcaaatac

SEQ ID NO: 4799 - RNA, 25 nt, Homo sapiens
  source 1..25: mol_type = unassigned RNA
ctgatgagtatgctctaaaagaata

SEQ ID NO: 4800 - RNA, 25 nt, Homo sapiens
  source 1..25: mol_type = unassigned RNA
aaaagaatatggcgtcatgcgtgtt

SEQ ID NO: 4801 - RNA, 25 nt, Homo sapiens
  source 1..25: mol_type = unassigned RNA
acgctaagagaacttaaactttcaa

SEQ ID NO: 4802 - RNA, 25 nt, Homo sapiens
  source 1..25: mol_type = unassigned RNA
taagagaacttaaactttcaaaggt

SEQ ID NO: 4803 - RNA, 25 nt, Homo sapiens
  source 1..25: mol_type = unassigned RNA
aggccagtatttgacacatttactc

SEQ ID NO: 4804 - RNA, 25 nt, Homo sapiens
  source 1..25: mol_type = unassigned RNA
catattcttttagagcatactcatc

SEQ ID NO: 4805 - RNA, 25 nt, Homo sapiens
  source 1..25: mol_type = unassigned RNA
agttctcttagcgtatagtcatgag

SEQ ID NO: 4806 - RNA, 25 nt, Homo sapiens
  source 1..25: mol_type = unassigned RNA
ctggtttttcttggctctactccag

SEQ ID NO: 4807 - RNA, 25 nt, Homo sapiens
  source 1..25: mol_type = unassigned RNA
ttcttggctctactccaggggaata

SEQ ID NO: 4808 - RNA, 25 nt, Homo sapiens
  source 1..25: mol_type = unassigned RNA
ctactccaggggaatacggagagaa

SEQ ID NO: 4809 - RNA, 25 nt, Homo sapiens
  source 1..25: mol_type = unassigned RNA
ccaggggaatacggagagaacggtc

SEQ ID NO: 4810 - RNA, 25 nt, Homo sapiens
  source 1..25: mol_type = unassigned RNA
gagaacggtctggcaataccacttt

SEQ ID NO: 4811 - RNA, 25 nt, Homo sapiens
  source 1..25: mol_type = unassigned RNA
ggtctggcaataccactttcggacc

SEQ ID NO: 4812 - RNA, 25 nt, Homo sapiens
  source 1..25: mol_type = unassigned RNA
tggcaataccactttcggacctggc

SEQ ID NO: 4813 - RNA, 25 nt, Homo sapiens
  source 1..25: mol_type = unassigned RNA
accactttcggacctggccggacca

SEQ ID NO: 4814 - RNA, 25 nt, Homo sapiens
  source 1..25: mol_type = unassigned RNA
cggaccacggcgtgcccagcgaccc

SEQ ID NO: 4815 - RNA, 25 nt, Homo sapiens
  source 1..25: mol_type = unassigned RNA
ggaccacggcgtgcccagcgaccct

SEQ ID NO: 4816 - RNA, 25 nt, Homo sapiens
  source 1..25: mol_type = unassigned RNA
gaccacggcgtgcccagcgaccctg

SEQ ID NO: 4817 - RNA, 25 nt, Homo sapiens
  source 1..25: mol_type = unassigned RNA
accacggcgtgcccagcgaccctgg

SEQ ID NO: 4818 - RNA, 25 nt, Homo sapiens
  source 1..25: mol_type = unassigned RNA
gtgcccagcgaccctgggggcgtgc

SEQ ID NO: 4819 - RNA, 25 nt, Homo sapiens
  source 1..25: mol_type = unassigned RNA
gaccctgggggcgtgctggacttcc

SEQ ID NO: 4820 - RNA, 25 nt, Homo sapiens
  source 1..25: mol_type = unassigned RNA
cctgggggcgtgctggacttcctgg

SEQ ID NO: 4821 - RNA, 25 nt, Homo sapiens
  source 1..25: mol_type = unassigned RNA
gggggcgtgctggacttcctggagg

SEQ ID NO: 4822 - RNA, 25 nt, Homo sapiens
  source 1..25: mol_type = unassigned RNA
ttcctggaggaggtgcaccataagc

SEQ ID NO: 4823 - RNA, 25 nt, Homo sapiens
  source 1..25: mol_type = unassigned RNA
gtgcaccataagcaggagagcatca

SEQ ID NO: 4824 - RNA, 25 nt, Homo sapiens
  source 1..25: mol_type = unassigned RNA
ataagcaggagagcatcatggatgc

SEQ ID NO: 4825 - RNA, 25 nt, Homo sapiens
  source 1..25: mol_type = unassigned RNA
taagcaggagagcatcatggatgca

SEQ ID NO: 4826 - RNA, 25 nt, Homo sapiens
  source 1..25: mol_type = unassigned RNA
caggagagcatcatggatgcagggc

SEQ ID NO: 4827 - RNA, 25 nt, Homo sapiens
  source 1..25: mol_type = unassigned RNA
agcatcatggatgcagggccggtcg

SEQ ID NO: 4828 - RNA, 25 nt, Homo sapiens
  source 1..25: mol_type = unassigned RNA
tgcagggccggtcgtggtgcactgc

SEQ ID NO: 4829 - RNA, 25 nt, Homo sapiens
  source 1..25: mol_type = unassigned RNA
aggtgacagctcctgctgcccctct

SEQ ID NO: 4830 - RNA, 25 nt, Homo sapiens
  source 1..25: mol_type = unassigned RNA
agcctgtccctgtctcctagcgccc

SEQ ID NO: 4831 - RNA, 25 nt, Homo sapiens
  source 1..25: mol_type = unassigned RNA
gcctgtccctgtctcctagcgccca

SEQ ID NO: 4832 - RNA, 25 nt, Homo sapiens
  source 1..25: mol_type = unassigned RNA
tacccactcctagctctttaactgt

SEQ ID NO: 4833 - RNA, 25 nt, Homo sapiens
  source 1..25: mol_type = unassigned RNA
gtaggaagaatttaatatctgtttg

SEQ ID NO: 4834 - RNA, 25 nt, Homo sapiens
  source 1..25: mol_type = unassigned RNA
tttgaggcatagagcaactgcattg

SEQ ID NO: 4835 - RNA, 25 nt, Homo sapiens
  source 1..25: mol_type = unassigned RNA
ttgaggcatagagcaactgcattga

SEQ ID NO: 4836 - RNA, 25 nt, Homo sapiens
  source 1..25: mol_type = unassigned RNA
tgcattgagggacattttgatccca

SEQ ID NO: 4837 - RNA, 25 nt, Homo sapiens
  source 1..25: mol_type = unassigned RNA
ctcctagaccctacagcactgccat

SEQ ID NO: 4838 - RNA, 25 nt, Homo sapiens
  source 1..25: mol_type = unassigned RNA
gaccctacagcactgccattggcca

SEQ ID NO: 4839 - RNA, 25 nt, Homo sapiens
  source 1..25: mol_type = unassigned RNA
acagcactgccattggccatggcca

SEQ ID NO: 4840 - RNA, 25 nt, Homo sapiens
  source 1..25: mol_type = unassigned RNA
agttgtgcattaaacaacttcatcc

SEQ ID NO: 4841 - RNA, 25 nt, Homo sapiens
  source 1..25: mol_type = unassigned RNA
ccagaccgttctctccgtattcccc

SEQ ID NO: 4842 - RNA, 25 nt, Homo sapiens
  source 1..25: mol_type = unassigned RNA
gccgtggtccggccaggtccgaaag

SEQ ID NO: 4843 - RNA, 25 nt, Homo sapiens
  source 1..25: mol_type = unassigned RNA
tcgctgggcacgccgtggtccggcc

SEQ ID NO: 4844 - RNA, 25 nt, Homo sapiens
  source 1..25: mol_type = unassigned RNA
cagggtcgctgggcacgccgtggtc

SEQ ID NO: 4845 - RNA, 25 nt, Homo sapiens
  source 1..25: mol_type = unassigned RNA
gcccccagggtcgctgggcacgccg

SEQ ID NO: 4846 - RNA, 25 nt, Homo sapiens
  source 1..25: mol_type = unassigned RNA
agtccagcacgcccccagggtcgct

SEQ ID NO: 4847 - RNA, 25 nt, Homo sapiens
  source 1..25: mol_type = unassigned RNA
aagtccagcacgcccccagggtcgc

SEQ ID NO: 4848 - RNA, 25 nt, Homo sapiens
  source 1..25: mol_type = unassigned RNA
ctccaggaagtccagcacgccccca

SEQ ID NO: 4849 - RNA, 25 nt, Homo sapiens
  source 1..25: mol_type = unassigned RNA
cctccaggaagtccagcacgccccc

SEQ ID NO: 4850 - RNA, 25 nt, Homo sapiens
  source 1..25: mol_type = unassigned RNA
ctcctgcttatggtgcacctcctcc

SEQ ID NO: 4851 - RNA, 25 nt, Homo sapiens
  source 1..25: mol_type = unassigned RNA
tgcatccatgatgctctcctgctta

SEQ ID NO: 4852 - RNA, 25 nt, Homo sapiens
  source 1..25: mol_type = unassigned RNA
gctgtcacctgcagtgcaccacgac

SEQ ID NO: 4853 - RNA, 25 nt, Homo sapiens
  source 1..25: mol_type = unassigned RNA
acaggctgtggcctagaggggcagc

SEQ ID NO: 4854 - RNA, 25 nt, Homo sapiens
  source 1..25: mol_type = unassigned RNA
gacagggacaggctgtggcctagag

SEQ ID NO: 4855 - RNA, 25 nt, Homo sapiens
  source 1..25: mol_type = unassigned RNA
agacagggacaggctgtggcctaga

SEQ ID NO: 4856 - RNA, 25 nt, Homo sapiens
  source 1..25: mol_type = unassigned RNA
gagacagggacaggctgtggcctag

SEQ ID NO: 4857 - RNA, 25 nt, Homo sapiens
  source 1..25: mol_type = unassigned RNA
ggcgctaggagacagggacaggctg

SEQ ID NO: 4858 - RNA, 25 nt, Homo sapiens
  source 1..25: mol_type = unassigned RNA
gccctgggcgctaggagacagggac

SEQ ID NO: 4859 - RNA, 25 nt, Homo sapiens
  source 1..25: mol_type = unassigned RNA
agcaagccctgggcgctaggagaca

SEQ ID NO: 4860 - RNA, 25 nt, Homo sapiens
  source 1..25: mol_type = unassigned RNA
aagcaagccctgggcgctaggagac

SEQ ID NO: 4861 - RNA, 25 nt, Homo sapiens
  source 1..25: mol_type = unassigned RNA
taggtaaaagcaagccctgggcgct

SEQ ID NO: 4862 - RNA, 25 nt, Homo sapiens
  source 1..25: mol_type = unassigned RNA
gagtgggtaggtaaaagcaagccct

SEQ ID NO: 4863 - RNA, 25 nt, Homo sapiens
  source 1..25: mol_type = unassigned RNA
ggagtgggtaggtaaaagcaagccc

SEQ ID NO: 4864 - RNA, 25 nt, Homo sapiens
  source 1..25: mol_type = unassigned RNA
tacagttaaagagctaggagtgggt

SEQ ID NO: 4865 - RNA, 25 nt, Homo sapiens
  source 1..25: mol_type = unassigned RNA
ttcctacagttaaagagctaggagt

SEQ ID NO: 4866 - RNA, 25 nt, Homo sapiens
  source 1..25: mol_type = unassigned RNA
cttcctacagttaaagagctaggag

SEQ ID NO: 4867 - RNA, 25 nt, Homo sapiens
  source 1..25: mol_type = unassigned RNA
aaattcttcctacagttaaagagct

SEQ ID NO: 4868 - RNA, 25 nt, Homo sapiens
  source 1..25: mol_type = unassigned RNA
gtagggtctaggagaaatatgcctt

SEQ ID NO: 4869 - RNA, 25 nt, Homo sapiens
  source 1..25: mol_type = unassigned RNA
tgtagggtctaggagaaatatgcct

SEQ ID NO: 4870 - RNA, 25 nt, Homo sapiens
  source 1..25: mol_type = unassigned RNA
ggccaatggcagtgctgtagggtct

SEQ ID NO: 4871 - RNA, 25 nt, Homo sapiens
  source 1..25: mol_type = unassigned RNA
ggccatggccaatggcagtgctgta

SEQ ID NO: 4872 - RNA, 25 nt, Homo sapiens
  source 1..25: mol_type = unassigned RNA
tggccatggccaatggcagtgctgt

SEQ ID NO: 4873 - RNA, 25 nt, Homo sapiens
  source 1..25: mol_type = unassigned RNA
agcatgttgccatggccatggccaa

SEQ ID NO: 4874 - RNA, 25 nt, Homo sapiens
  source 1..25: mol_type = unassigned RNA
ttaactgagcatgttgccatggcca

SEQ ID NO: 4875 - RNA, 25 nt, Homo sapiens
  source 1..25: mol_type = unassigned RNA
gctgttttaactgagcatgttgcca

SEQ ID NO: 4876 - RNA, 25 nt, Homo sapiens
  source 1..25: mol_type = unassigned RNA
aagttgtttaatgcacaacttctgg

SEQ ID NO: 4877 - RNA, 25 nt, Homo sapiens
  source 1..25: mol_type = unassigned RNA
atgaagttgtttaatgcacaacttc

SEQ ID NO: 4878 - RNA, 25 nt, Homo sapiens
  source 1..25: mol_type = unassigned RNA
aagaataaggagaaactgcagagcc

SEQ ID NO: 4879 - RNA, 25 nt, Homo sapiens
  source 1..25: mol_type = unassigned RNA
ctttttgtccttctgcccgcagtgc

SEQ ID NO: 4880 - RNA, 25 nt, Homo sapiens
  source 1..25: mol_type = unassigned RNA
gtccttctgcccgcagtgctggaat

SEQ ID NO: 4881 - RNA, 25 nt, Homo sapiens
  source 1..25: mol_type = unassigned RNA
ttctgcccgcagtgctggaattggc

SEQ ID NO: 4882 - RNA, 25 nt, Homo sapiens
  source 1..25: mol_type = unassigned RNA
cccgcagtgctggaattggccggac

SEQ ID NO: 4883 - RNA, 25 nt, Homo sapiens
  source 1..25: mol_type = unassigned RNA
ccgcagtgctggaattggccggaca

SEQ ID NO: 4884 - RNA, 25 nt, Homo sapiens
  source 1..25: mol_type = unassigned RNA
ttcttattgacatcatcagagagaa

SEQ ID NO: 4885 - RNA, 25 nt, Homo sapiens
  source 1..25: mol_type = unassigned RNA
ttattgacatcatcagagagaaagg

SEQ ID NO: 4886 - RNA, 25 nt, Homo sapiens
  source 1..25: mol_type = unassigned RNA
tattgacatcatcagagagaaaggt

SEQ ID NO: 4887 - RNA, 25 nt, Homo sapiens
  source 1..25: mol_type = unassigned RNA
tcatcagagagaaaggtgggtcatc

SEQ ID NO: 4888 - RNA, 25 nt, Homo sapiens
  source 1..25: mol_type = unassigned RNA
tcagagagaaaggtgggtcatctgg

SEQ ID NO: 4889 - RNA, 25 nt, Homo sapiens
  source 1..25: mol_type = unassigned RNA
cagagagaaaggtgggtcatctggt

SEQ ID NO: 4890 - RNA, 25 nt, Homo sapiens
  source 1..25: mol_type = unassigned RNA
ggccaattccagcactgcgggcaga

SEQ ID NO: 4891 - RNA, 25 nt, Homo sapiens
  source 1..25: mol_type = unassigned RNA
cctgtccggccaattccagcactgc

SEQ ID NO: 4892 - RNA, 25 nt, Homo sapiens
  source 1..25: mol_type = unassigned RNA
ccctgtccggccaattccagcactg

SEQ ID NO: 4893 - RNA, 25 nt, Homo sapiens
  source 1..25: mol_type = unassigned RNA
atcaatcacaatgaacgtccctgtc

SEQ ID NO: 4894 - RNA, 25 nt, Homo sapiens
  source 1..25: mol_type = unassigned RNA
attgacgttcccaaaaccatccaga

SEQ ID NO: 4895 - RNA, 25 nt, Homo sapiens
  source 1..25: mol_type = unassigned RNA
cgttcccaaaaccatccagatggtg

SEQ ID NO: 4896 - RNA, 25 nt, Homo sapiens
  source 1..25: mol_type = unassigned RNA
aaccatccagatggtgcggtctcag

SEQ ID NO: 4897 - RNA, 25 nt, Homo sapiens
  source 1..25: mol_type = unassigned RNA
tccagatggtgcggtctcagaggtc

SEQ ID NO: 4898 - RNA, 25 nt, Homo sapiens
  source 1..25: mol_type = unassigned RNA
ccagatggtgcggtctcagaggtca

SEQ ID NO: 4899 - RNA, 25 nt, Homo sapiens
  source 1..25: mol_type = unassigned RNA
atggtgcggtctcagaggtcaggga

SEQ ID NO: 4900 - RNA, 25 nt, Homo sapiens
  source 1..25: mol_type = unassigned RNA
gaagcacagtaccgatttatctata

SEQ ID NO: 4901 - RNA, 25 nt, Homo sapiens
  source 1..25: mol_type = unassigned RNA
gcacagtaccgatttatctatatgg

SEQ ID NO: 4902 - RNA, 25 nt, Homo sapiens
  source 1..25: mol_type = unassigned RNA
gcattatattgaaacactacagcgc

SEQ ID NO: 4903 - RNA, 25 nt, Homo sapiens
  source 1..25: mol_type = unassigned RNA
ctacagcgcaggattgaagaagagc

SEQ ID NO: 4904 - RNA, 25 nt, Homo sapiens
  source 1..25: mol_type = unassigned RNA
ttgaagaagagcaggtaccagcctg

SEQ ID NO: 4905 - RNA, 25 nt, Homo sapiens
  source 1..25: mol_type = unassigned RNA
tgaagaagagcaggtaccagcctga

SEQ ID NO: 4906 - RNA, 25 nt, Homo sapiens
  source 1..25: mol_type = unassigned RNA
gaagagcaggtaccagcctgagggc

SEQ ID NO: 4907 - RNA, 25 nt, Homo sapiens
  source 1..25: mol_type = unassigned RNA
tcaatatcgcagtcaacacctacga

SEQ ID NO: 4908 - RNA, 25 nt, Homo sapiens
  source 1..25: mol_type = unassigned RNA
gagaccgcaccatctggatggtttt

SEQ ID NO: 4909 - RNA, 25 nt, Homo sapiens
  source 1..25: mol_type = unassigned RNA
tgagaccgcaccatctggatggttt

SEQ ID NO: 4910 - RNA, 25 nt, Homo sapiens
  source 1..25: mol_type = unassigned RNA
gacctctgagaccgcaccatctgga

SEQ ID NO: 4911 - RNA, 25 nt, Homo sapiens
  source 1..25: mol_type = unassigned RNA
ccctgacctctgagaccgcaccatc

SEQ ID NO: 4912 - RNA, 25 nt, Homo sapiens
  source 1..25: mol_type = unassigned RNA
gataaatcggtactgtgcttctgtc

SEQ ID NO: 4913 - RNA, 25 nt, Homo sapiens
  source 1..25: mol_type = unassigned RNA
atgctggaccgccatatagataaat

SEQ ID NO: 4914 - RNA, 25 nt, Homo sapiens
  source 1..25: mol_type = unassigned RNA
gcgctgtagtgtttcaatataatgc

SEQ ID NO: 4915 - RNA, 25 nt, Homo sapiens
  source 1..25: mol_type = unassigned RNA
ctcttccaaatttcagaaaagcaag

SEQ ID NO: 4916 - RNA, 25 nt, Homo sapiens
  source 1..25: mol_type = unassigned RNA
ccaaatttcagaaaagcaagaggaa

SEQ ID NO: 4917 - RNA, 25 nt, Homo sapiens
  source 1..25: mol_type = unassigned RNA
caaatttcagaaaagcaagaggaaa

SEQ ID NO: 4918 - RNA, 25 nt, Homo sapiens
  source 1..25: mol_type = unassigned RNA
tatacaaatattaagtattctctag

SEQ ID NO: 4919 - RNA, 25 nt, Homo sapiens
  source 1..25: mol_type = unassigned RNA
agtattctctagcggaccagacgag

SEQ ID NO: 4920 - RNA, 25 nt, Homo sapiens
  source 1..25: mol_type = unassigned RNA
ccctgtgcagagtaagtagtgctga

SEQ ID NO: 4921 - RNA, 25 nt, Homo sapiens
  source 1..25: mol_type = unassigned RNA
cctttcctcttgcttttctgaaatt

SEQ ID NO: 4922 - RNA, 25 nt, Homo sapiens
  source 1..25: mol_type = unassigned RNA
gagagggctctgatctccactcgtc

SEQ ID NO: 4923 - RNA, 25 nt, Homo sapiens
  source 1..25: mol_type = unassigned RNA
tggcgttggagtacaaggcgggaga

SEQ ID NO: 4924 - RNA, 25 nt, Homo sapiens
  source 1..25: mol_type = unassigned RNA
gtggcgttggagtacaaggcgggag

SEQ ID NO: 4925 - RNA, 25 nt, Homo sapiens
  source 1..25: mol_type = unassigned RNA
acagggtggcgttggagtacaaggc

SEQ ID NO: 4926 - RNA, 25 nt, Homo sapiens
  source 1..25: mol_type = unassigned RNA
cacagggtggcgttggagtacaagg

SEQ ID NO: 4927 - RNA, 25 nt, Homo sapiens
  source 1..25: mol_type = unassigned RNA
ctgcacagggtggcgttggagtaca

SEQ ID NO: 4928 - RNA, 25 nt, Homo sapiens
  source 1..25: mol_type = unassigned RNA
ctacttactctgcacagggtggcgt

SEQ ID NO: 4929 - RNA, 25 nt, Homo sapiens
  source 1..25: mol_type = unassigned RNA
tcagcactacttactctgcacaggg

SEQ ID NO: 4930 - RNA, 25 nt, Homo sapiens
  source 1..25: mol_type = unassigned RNA
ccttcagcactacttactctgcaca

SEQ ID NO: 4931 - RNA, 25 nt, Homo sapiens
  source 1..25: mol_type = unassigned RNA
tccttcagcactacttactctgcac

SEQ ID NO: 4932 - RNA, 25 nt, Homo sapiens
  source 1..25: mol_type = unassigned RNA
gacagtgctagagtctatgaaaacg

SEQ ID NO: 4933 - RNA, 25 nt, Homo sapiens
  source 1..25: mol_type = unassigned RNA
acagtgctagagtctatgaaaacgt

SEQ ID NO: 4934 - RNA, 25 nt, Homo sapiens
  source 1..25: mol_type = unassigned RNA
cctgccaaaacttcagcacagaaat

SEQ ID NO: 4935 - RNA, 25 nt, Homo sapiens
  source 1..25: mol_type = unassigned RNA
actctagcactgtcttctctcattc

SEQ ID NO: 4936 - RNA, 25 nt, Homo sapiens
  source 1..25: mol_type = unassigned RNA
tctgaaacttttctgctgttgcatc

SEQ ID NO: 4937 - RNA, 25 nt, Homo sapiens
  source 1..25: mol_type = unassigned RNA
cctatttctgtgctgaagttttggc

SEQ ID NO: 4938 - RNA, 25 nt, Homo sapiens
  source 1..25: mol_type = unassigned RNA
aatacctatttctgtgctgaagttt

SEQ ID NO: 4939 - RNA, 25 nt, Homo sapiens
  source 1..25: mol_type = unassigned RNA
tcttaacttatttcttccccagatg

SEQ ID NO: 4940 - RNA, 25 nt, Homo sapiens
  source 1..25: mol_type = unassigned RNA
agaaagtttatgtgaagacagaatt

SEQ ID NO: 4941 - RNA, 25 nt, Homo sapiens
  source 1..25: mol_type = unassigned RNA
tttatgtgaagacagaatttggatt

SEQ ID NO: 4942 - RNA, 25 nt, Homo sapiens
  source 1..25: mol_type = unassigned RNA
tgtgaagacagaatttggatttgga

SEQ ID NO: 4943 - RNA, 25 nt, Homo sapiens
  source 1..25: mol_type = unassigned RNA
atttggatttggaaggcttgcaatg

SEQ ID NO: 4944 - RNA, 25 nt, Homo sapiens
  source 1..25: mol_type = unassigned RNA
attttatagaatttgtttgaaattg

SEQ ID NO: 4945 - RNA, 25 nt, Homo sapiens
  source 1..25: mol_type = unassigned RNA
attgtgcgctgtattttgcagatta

SEQ ID NO: 4946 - RNA, 25 nt, Homo sapiens
  source 1..25: mol_type = unassigned RNA
ttgtgcgctgtattttgcagattat

SEQ ID NO: 4947 - RNA, 25 nt, Homo sapiens
  source 1..25: mol_type = unassigned RNA
tgtgcgctgtattttgcagattatg

SEQ ID NO: 4948 - RNA, 25 nt, Homo sapiens
  source 1..25: mol_type = unassigned RNA
ttatggggattcaaattctagtaat

SEQ ID NO: 4949 - RNA, 25 nt, Homo sapiens
  source 1..25: mol_type = unassigned RNA
gtttaattttttttttcctcattgt

SEQ ID NO: 4950 - RNA, 25 nt, Homo sapiens
  source 1..25: mol_type = unassigned RNA
tttaattttttttttcctcattgtt

SEQ ID NO: 4951 - RNA, 25 nt, Homo sapiens
  source 1..25: mol_type = unassigned RNA
ttaattttttttttcctcattgttg

SEQ ID NO: 4952 - RNA, 25 nt, Homo sapiens
  source 1..25: mol_type = unassigned RNA
ttggggatgatgagaagaaatgatt

SEQ ID NO: 4953 - RNA, 25 nt, Homo sapiens
  source 1..25: mol_type = unassigned RNA
tggggatgatgagaagaaatgattt

SEQ ID NO: 4954 - RNA, 25 nt, Homo sapiens
  source 1..25: mol_type = unassigned RNA
tcatttaccatcatgtatccagtag

SEQ ID NO: 4955 - RNA, 25 nt, Homo sapiens
  source 1..25: mol_type = unassigned RNA
tccagtagtggataattcattttga

SEQ ID NO: 4956 - RNA, 25 nt, Homo sapiens
  source 1..25: mol_type = unassigned RNA
aattcattttgatggcttctatttt

SEQ ID NO: 4957 - RNA, 25 nt, Homo sapiens
  source 1..25: mol_type = unassigned RNA
gactgtcagaagttgacctttgcac

SEQ ID NO: 4958 - RNA, 25 nt, Homo sapiens
  source 1..25: mol_type = unassigned RNA
ttaaagagtcatagaaaaagaatca

SEQ ID NO: 4959 - RNA, 25 nt, Homo sapiens
  source 1..25: mol_type = unassigned RNA
aagaatcatggatatttatgaatta

SEQ ID NO: 4960 - RNA, 25 nt, Homo sapiens
  source 1..25: mol_type = unassigned RNA
atggatatttatgaattaaggtaag

SEQ ID NO: 4961 - RNA, 25 nt, Homo sapiens
  source 1..25: mol_type = unassigned RNA
tatttatgaattaaggtaagaggtg

SEQ ID NO: 4962 - RNA, 25 nt, Homo sapiens
  source 1..25: mol_type = unassigned RNA
ttccagccgttgaccaattatagtt

SEQ ID NO: 4963 - RNA, 25 nt, Homo sapiens
  source 1..25: mol_type = unassigned RNA
gttcggctgttgactgagaagtttg

SEQ ID NO: 4964 - RNA, 25 nt, Homo sapiens
  source 1..25: mol_type = unassigned RNA
cggctgttgactgagaagtttgtgg

SEQ ID NO: 4965 - RNA, 25 nt, Homo sapiens
  source 1..25: mol_type = unassigned RNA
ggctgttgactgagaagtttgtggt

SEQ ID NO: 4966 - RNA, 25 nt, Homo sapiens
  source 1..25: mol_type = unassigned RNA
aataattgtcttgtacttagaaaaa

SEQ ID NO: 4967 - RNA, 25 nt, Homo sapiens
  source 1..25: mol_type = unassigned RNA
ggcgtctatgaatgaccagtgtttt

SEQ ID NO: 4968 - RNA, 25 nt, Homo sapiens
  source 1..25: mol_type = unassigned RNA
tggttttttctaatcagaagaaagc

SEQ ID NO: 4969 - RNA, 25 nt, Homo sapiens
  source 1..25: mol_type = unassigned RNA
ggttttttctaatcagaagaaagct

SEQ ID NO: 4970 - RNA, 25 nt, Homo sapiens
  source 1..25: mol_type = unassigned RNA
gttttttctaatcagaagaaagctg

SEQ ID NO: 4971 - RNA, 25 nt, Homo sapiens
  source 1..25: mol_type = unassigned RNA
gattcaagaaaagggtgtgaagtag

SEQ ID NO: 4972 - RNA, 25 nt, Homo sapiens
  source 1..25: mol_type = unassigned RNA
ggtgtgaagtagaggtgcagttaag

SEQ ID NO: 4973 - RNA, 25 nt, Homo sapiens
  source 1..25: mol_type = unassigned RNA
gtgtgaagtagaggtgcagttaagt

SEQ ID NO: 4974 - RNA, 25 nt, Homo sapiens
  source 1..25: mol_type = unassigned RNA
tgtgaagtagaggtgcagttaagtg

SEQ ID NO: 4975 - RNA, 25 nt, Homo sapiens
  source 1..25: mol_type = unassigned RNA
gtgaagtagaggtgcagttaagtgg

SEQ ID NO: 4976 - RNA, 25 nt, Homo sapiens
  source 1..25: mol_type = unassigned RNA
tgaagtagaggtgcagttaagtggg

SEQ ID NO: 4977 - RNA, 25 nt, Homo sapiens
  source 1..25: mol_type = unassigned RNA
agtggggggccactagtctaacaga

SEQ ID NO: 4978 - RNA, 25 nt, Homo sapiens
  source 1..25: mol_type = unassigned RNA
taacagacggtcacaaccagtgcca

SEQ ID NO: 4979 - RNA, 25 nt, Homo sapiens
  source 1..25: mol_type = unassigned RNA
tcacaaccagtgccatggaaaacca

SEQ ID NO: 4980 - RNA, 25 nt, Homo sapiens
  source 1..25: mol_type = unassigned RNA
caaaagcagaagttgctagtgacct

SEQ ID NO: 4981 - RNA, 25 nt, Homo sapiens
  source 1..25: mol_type = unassigned RNA
aaaagcagaagttgctagtgacctt

SEQ ID NO: 4982 - RNA, 25 nt, Homo sapiens
  source 1..25: mol_type = unassigned RNA
ggaagccgaagctgcttacagtagc

SEQ ID NO: 4983 - RNA, 25 nt, Homo sapiens
  source 1..25: mol_type = unassigned RNA
gaagccgaagctgcttacagtagct

SEQ ID NO: 4984 - RNA, 25 nt, Homo sapiens
  source 1..25: mol_type = unassigned RNA
gaaagtcagactaagaaataaagag

SEQ ID NO: 4985 - RNA, 25 nt, Homo sapiens
  source 1..25: mol_type = unassigned RNA
aaagtcagactaagaaataaagaga

SEQ ID NO: 4986 - RNA, 25 nt, Homo sapiens
  source 1..25: mol_type = unassigned RNA
tttctgctagccctgagcctatttt

SEQ ID NO: 4987 - RNA, 25 nt, Homo sapiens
  source 1..25: mol_type = unassigned RNA
tgagcctatttttggaaccagcact

SEQ ID NO: 4988 - RNA, 25 nt, Homo sapiens
  source 1..25: mol_type = unassigned RNA
gagcctatttttggaaccagcactt

SEQ ID NO: 4989 - RNA, 25 nt, Homo sapiens
  source 1..25: mol_type = unassigned RNA
agcctatttttggaaccagcacttg

SEQ ID NO: 4990 - RNA, 25 nt, Homo sapiens
  source 1..25: mol_type = unassigned RNA
agcacttggggaaactgatcttgtg

SEQ ID NO: 4991 - RNA, 25 nt, Homo sapiens
  source 1..25: mol_type = unassigned RNA
cttggggaaactgatcttgtgagga

SEQ ID NO: 4992 - RNA, 25 nt, Homo sapiens
  source 1..25: mol_type = unassigned RNA
tgatcttgtgaggatggatgtgttt

SEQ ID NO: 4993 - RNA, 25 nt, Homo sapiens
  source 1..25: mol_type = unassigned RNA
gatcttgtgaggatggatgtgttta

SEQ ID NO: 4994 - RNA, 25 nt, Homo sapiens
  source 1..25: mol_type = unassigned RNA
tgaggatggatgtgtttagggacac

SEQ ID NO: 4995 - RNA, 25 nt, Homo sapiens
  source 1..25: mol_type = unassigned RNA
gaggatggatgtgtttagggacaca

SEQ ID NO: 4996 - RNA, 25 nt, Homo sapiens
  source 1..25: mol_type = unassigned RNA
gcttttgagagcagcaccaccccac

SEQ ID NO: 4997 - RNA, 25 nt, Homo sapiens
  source 1..25: mol_type = unassigned RNA
cttttgagagcagcaccaccccact

SEQ ID NO: 4998 - RNA, 25 nt, Homo sapiens
  source 1..25: mol_type = unassigned RNA
ttttgagagcagcaccaccccactg

SEQ ID NO: 4999 - RNA, 25 nt, Homo sapiens
  source 1..25: mol_type = unassigned RNA
caccccactggggcatccccagact

SEQ ID NO: 5000 - RNA, 25 nt, Homo sapiens
  source 1..25: mol_type = unassigned RNA
accccactggggcatccccagactt

SEQ ID NO: 5001 - RNA, 25 nt, Homo sapiens
  source 1..25: mol_type = unassigned RNA
aaacgtgactctttcttaatgccac

SEQ ID NO: 5002 - RNA, 25 nt, Homo sapiens
  source 1..25: mol_type = unassigned RNA
aacgtgactctttcttaatgccact

SEQ ID NO: 5003 - RNA, 25 nt, Homo sapiens
  source 1..25: mol_type = unassigned RNA
ttcttaatgccactgggttttagtc

SEQ ID NO: 5004 - RNA, 25 nt, Homo sapiens
  source 1..25: mol_type = unassigned RNA
gggttttagtcaggccacagtgaga

SEQ ID NO: 5005 - RNA, 25 nt, Homo sapiens
  source 1..25: mol_type = unassigned RNA
cacagtgagaaggaacagccctaac

SEQ ID NO: 5006 - RNA, 25 nt, Homo sapiens
  source 1..25: mol_type = unassigned RNA
gaacagccctaacaggcctccagcc

SEQ ID NO: 5007 - RNA, 25 nt, Homo sapiens
  source 1..25: mol_type = unassigned RNA
gcctcatatgttgaatcatccagtg

SEQ ID NO: 5008 - RNA, 25 nt, Homo sapiens
  source 1..25: mol_type = unassigned RNA
gcggatatttcaatgaaaatatcat

SEQ ID NO: 5009 - RNA, 25 nt, Homo sapiens
  source 1..25: mol_type = unassigned RNA
aaatatcattggttgacttttgtga

SEQ ID NO: 5010 - RNA, 25 nt, Homo sapiens
  source 1..25: mol_type = unassigned RNA
gacttttgtgatggtaataatgcta

SEQ ID NO: 5011 - RNA, 25 nt, Homo sapiens
  source 1..25: mol_type = unassigned RNA
ctatggcatctttgccatgaagttg

SEQ ID NO: 5012 - RNA, 25 nt, Homo sapiens
  source 1..25: mol_type = unassigned RNA
ctttgccatgaagttgtggcctcct

SEQ ID NO: 5013 - RNA, 25 nt, Homo sapiens
  source 1..25: mol_type = unassigned RNA
tggcctccttggattcttctgactt

SEQ ID NO: 5014 - RNA, 25 nt, Homo sapiens
  source 1..25: mol_type = unassigned RNA
gattcttctgactttggcttctgaa

SEQ ID NO: 5015 - RNA, 25 nt, Homo sapiens
  source 1..25: mol_type = unassigned RNA
cttctgactttggcttctgaaagga

SEQ ID NO: 5016 - RNA, 25 nt, Homo sapiens
  source 1..25: mol_type = unassigned RNA
tgaaaggaaggcctagatccagccc

SEQ ID NO: 5017 - RNA, 25 nt, Homo sapiens
  source 1..25: mol_type = unassigned RNA
aaggaaggcctagatccagccctgg

SEQ ID NO: 5018 - RNA, 25 nt, Homo sapiens
  source 1..25: mol_type = unassigned RNA
cagccctggtggtagttcctttctg

SEQ ID NO: 5019 - RNA, 25 nt, Homo sapiens
  source 1..25: mol_type = unassigned RNA
gaggtctctcagtcccttgagactt

SEQ ID NO: 5020 - RNA, 25 nt, Homo sapiens
  source 1..25: mol_type = unassigned RNA
aggtctctcagtcccttgagacttt

SEQ ID NO: 5021 - RNA, 25 nt, Homo sapiens
  source 1..25: mol_type = unassigned RNA
ggtctctcagtcccttgagactttg

SEQ ID NO: 5022 - RNA, 25 nt, Homo sapiens
  source 1..25: mol_type = unassigned RNA
agtcccttgagactttggggtagtt

SEQ ID NO: 5023 - RNA, 25 nt, Homo sapiens
  source 1..25: mol_type = unassigned RNA
tgaactttgaattgcttcagaacac

SEQ ID NO: 5024 - RNA, 25 nt, Homo sapiens
  source 1..25: mol_type = unassigned RNA
tttgaattgcttcagaacacaggtg

SEQ ID NO: 5025 - RNA, 25 nt, Homo sapiens
  source 1..25: mol_type = unassigned RNA
gcttcagaacacaggtgtggcctga

SEQ ID NO: 5026 - RNA, 25 nt, Homo sapiens
  source 1..25: mol_type = unassigned RNA
tgtggcctgaaggtattcccttatt

SEQ ID NO: 5027 - RNA, 25 nt, Homo sapiens
  source 1..25: mol_type = unassigned RNA
gtggcctgaaggtattcccttatta

SEQ ID NO: 5028 - RNA, 25 nt, Homo sapiens
  source 1..25: mol_type = unassigned RNA
catcgactcattctccattttgctt

SEQ ID NO: 5029 - RNA, 25 nt, Homo sapiens
  source 1..25: mol_type = unassigned RNA
gttttgtcttgacttgacttgactt

SEQ ID NO: 5030 - RNA, 25 nt, Homo sapiens
  source 1..25: mol_type = unassigned RNA
ttttgtcttgacttgacttgacttt

SEQ ID NO: 5031 - RNA, 25 nt, Homo sapiens
  source 1..25: mol_type = unassigned RNA
tttgtcttgacttgacttgactttg

SEQ ID NO: 5032 - RNA, 25 nt, Homo sapiens
  source 1..25: mol_type = unassigned RNA
ttgtcttgacttgacttgactttgg

SEQ ID NO: 5033 - RNA, 25 nt, Homo sapiens
  source 1..25: mol_type = unassigned RNA
agatcagttgcttttatactcagaa

SEQ ID NO: 5034 - RNA, 25 nt, Homo sapiens
  source 1..25: mol_type = unassigned RNA
tactcagaatggaaatacctgatct

SEQ ID NO: 5035 - RNA, 25 nt, Homo sapiens
  source 1..25: mol_type = unassigned RNA
gatttcatttagatttccctccacg

SEQ ID NO: 5036 - RNA, 25 nt, Homo sapiens
  source 1..25: mol_type = unassigned RNA
aactatcatgttcttatgtaaactt

SEQ ID NO: 5037 - RNA, 25 nt, Homo sapiens
  source 1..25: mol_type = unassigned RNA
catgttcttatgtaaacttaggcca

SEQ ID NO: 5038 - RNA, 25 nt, Homo sapiens
  source 1..25: mol_type = unassigned RNA
caaggccagagttatcatagtccct

SEQ ID NO: 5039 - RNA, 25 nt, Homo sapiens
  source 1..25: mol_type = unassigned RNA
agttatcatagtccctaggttgcta

SEQ ID NO: 5040 - RNA, 25 nt, Homo sapiens
  source 1..25: mol_type = unassigned RNA
aggttgctacggcttatcatgtgct

SEQ ID NO: 5041 - RNA, 25 nt, Homo sapiens
  source 1..25: mol_type = unassigned RNA
tacggcttatcatgtgcttggtaaa

SEQ ID NO: 5042 - RNA, 25 nt, Homo sapiens
  source 1..25: mol_type = unassigned RNA
catgtgcttggtaaaaggtgatcgc

SEQ ID NO: 5043 - RNA, 25 nt, Homo sapiens
  source 1..25: mol_type = unassigned RNA
tcagacgagtttactttacatgaga

SEQ ID NO: 5044 - RNA, 25 nt, Homo sapiens
  source 1..25: mol_type = unassigned RNA
agtttactttacatgagatggaatc

SEQ ID NO: 5045 - RNA, 25 nt, Homo sapiens
  source 1..25: mol_type = unassigned RNA
ttacatgagatggaatcaggcagag

SEQ ID NO: 5046 - RNA, 25 nt, Homo sapiens
  source 1..25: mol_type = unassigned RNA
atgagatggaatcaggcagagaggc

SEQ ID NO: 5047 - RNA, 25 nt, Homo sapiens
  source 1..25: mol_type = unassigned RNA
tgagatggaatcaggcagagaggct

SEQ ID NO: 5048 - RNA, 25 nt, Homo sapiens
  source 1..25: mol_type = unassigned RNA
gaatcaggcagagaggctgggatga

SEQ ID NO: 5049 - RNA, 25 nt, Homo sapiens
  source 1..25: mol_type = unassigned RNA
aggctgggatgatggagaaagctcg

SEQ ID NO: 5050 - RNA, 25 nt, Homo sapiens
  source 1..25: mol_type = unassigned RNA
aggtgaagttttaaaaaaaaagttg

SEQ ID NO: 5051 - RNA, 25 nt, Homo sapiens
  source 1..25: mol_type = unassigned RNA
aagttttaaaaaaaaagttgtggaa

SEQ ID NO: 5052 - RNA, 25 nt, Homo sapiens
  source 1..25: mol_type = unassigned RNA
agttgtggaaaggaaagttccaaag

SEQ ID NO: 5053 - RNA, 25 nt, Homo sapiens
  source 1..25: mol_type = unassigned RNA
tgtggaaaggaaagttccaaagagg

SEQ ID NO: 5054 - RNA, 25 nt, Homo sapiens
  source 1..25: mol_type = unassigned RNA
gaaagttccaaagaggtggtttctg

SEQ ID NO: 5055 - RNA, 25 nt, Homo sapiens
  source 1..25: mol_type = unassigned RNA
ggtttctgaggaagtcagagcgccc

SEQ ID NO: 5056 - RNA, 25 nt, Homo sapiens
  source 1..25: mol_type = unassigned RNA
gtttctgaggaagtcagagcgccca

SEQ ID NO: 5057 - RNA, 25 nt, Homo sapiens
  source 1..25: mol_type = unassigned RNA
cgcccagggccagagcagtcagtaa

SEQ ID NO: 5058 - RNA, 25 nt, Homo sapiens
  source 1..25: mol_type = unassigned RNA
gcccagggccagagcagtcagtaat

SEQ ID NO: 5059 - RNA, 25 nt, Homo sapiens
  source 1..25: mol_type = unassigned RNA
cagagcagtcagtaatgggtgaatg

SEQ ID NO: 5060 - RNA, 25 nt, Homo sapiens
  source 1..25: mol_type = unassigned RNA
tcagtaatgggtgaatgaggttgtt

SEQ ID NO: 5061 - RNA, 25 nt, Homo sapiens
  source 1..25: mol_type = unassigned RNA
gggtgaatgaggttgtttggaaagt

SEQ ID NO: 5062 - RNA, 25 nt, Homo sapiens
  source 1..25: mol_type = unassigned RNA
ttggaaagtcggtgtgacagacaca

SEQ ID NO: 5063 - RNA, 25 nt, Homo sapiens
  source 1..25: mol_type = unassigned RNA
agacacatggatgccatctacttct

SEQ ID NO: 5064 - RNA, 25 nt, Homo sapiens
  source 1..25: mol_type = unassigned RNA
tggatgccatctacttctaggttgc

SEQ ID NO: 5065 - RNA, 25 nt, Homo sapiens
  source 1..25: mol_type = unassigned RNA
atgccatctacttctaggttgctgg

SEQ ID NO: 5066 - RNA, 25 nt, Homo sapiens
  source 1..25: mol_type = unassigned RNA
tgccatctacttctaggttgctggt

SEQ ID NO: 5067 - RNA, 25 nt, Homo sapiens
  source 1..25: mol_type = unassigned RNA
atgcacaatattccatagctcactg

SEQ ID NO: 5068 - RNA, 25 nt, Homo sapiens
  source 1..25: mol_type = unassigned RNA
ctgaggattttaaaattataagcat

SEQ ID NO: 5069 - RNA, 25 nt, Homo sapiens
  source 1..25: mol_type = unassigned RNA
attataagcataggattttatattt

SEQ ID NO: 5070 - RNA, 25 nt, Homo sapiens
  source 1..25: mol_type = unassigned RNA
ttataagcataggattttatatttt

SEQ ID NO: 5071 - RNA, 25 nt, Homo sapiens
  source 1..25: mol_type = unassigned RNA
tataagcataggattttatattttg

SEQ ID NO: 5072 - RNA, 25 nt, Homo sapiens
  source 1..25: mol_type = unassigned RNA
tatattttggggtgaaagaattatc

SEQ ID NO: 5073 - RNA, 25 nt, Homo sapiens
  source 1..25: mol_type = unassigned RNA
gggtgaaagaattatctggcacatt

SEQ ID NO: 5074 - RNA, 25 nt, Homo sapiens
  source 1..25: mol_type = unassigned RNA
aagaattatctggcacattaggtat

SEQ ID NO: 5075 - RNA, 25 nt, Homo sapiens
  source 1..25: mol_type = unassigned RNA
ataactttttttaaaaaaaactaaa

SEQ ID NO: 5076 - RNA, 25 nt, Homo sapiens
  source 1..25: mol_type = unassigned RNA
taaaaggcgcttcatgtccagtgtg

SEQ ID NO: 5077 - RNA, 25 nt, Homo sapiens
  source 1..25: mol_type = unassigned RNA
cagtgtgtggcccttctgaaactta

SEQ ID NO: 5078 - RNA, 25 nt, Homo sapiens
  source 1..25: mol_type = unassigned RNA
atggtcatctctcccactgaaacca

SEQ ID NO: 5079 - RNA, 25 nt, Homo sapiens
  source 1..25: mol_type = unassigned RNA
actgaaaccaaggtcttttcaaatg

SEQ ID NO: 5080 - RNA, 25 nt, Homo sapiens
  source 1..25: mol_type = unassigned RNA
caaggtcttttcaaatgtggctaaa

SEQ ID NO: 5081 - RNA, 25 nt, Homo sapiens
  source 1..25: mol_type = unassigned RNA
aaggtcttttcaaatgtggctaaat

SEQ ID NO: 5082 - RNA, 25 nt, Homo sapiens
  source 1..25: mol_type = unassigned RNA
aggtcttttcaaatgtggctaaatg

SEQ ID NO: 5083 - RNA, 25 nt, Homo sapiens
  source 1..25: mol_type = unassigned RNA
tttcaaatgtggctaaatggggatg

SEQ ID NO: 5084 - RNA, 25 nt, Homo sapiens
  source 1..25: mol_type = unassigned RNA
gtggctaaatggggatgaggagaca

SEQ ID NO: 5085 - RNA, 25 nt, Homo sapiens
  source 1..25: mol_type = unassigned RNA
tggctaaatggggatgaggagacac

SEQ ID NO: 5086 - RNA, 25 nt, Homo sapiens
  source 1..25: mol_type = unassigned RNA
taaatggggatgaggagacacgggt

SEQ ID NO: 5087 - RNA, 25 nt, Homo sapiens
  source 1..25: mol_type = unassigned RNA
tgaggagacacgggtaggactttct

SEQ ID NO: 5088 - RNA, 25 nt, Homo sapiens
  source 1..25: mol_type = unassigned RNA
cattctttaaagagccaagttgctt

SEQ ID NO: 5089 - RNA, 25 nt, Homo sapiens
  source 1..25: mol_type = unassigned RNA
attctttaaagagccaagttgcttc

SEQ ID NO: 5090 - RNA, 25 nt, Homo sapiens
  source 1..25: mol_type = unassigned RNA
ttctttaaagagccaagttgcttcg

SEQ ID NO: 5091 - RNA, 25 nt, Homo sapiens
  source 1..25: mol_type = unassigned RNA
gccaagttgcttcggggaaacagcc

SEQ ID NO: 5092 - RNA, 25 nt, Homo sapiens
  source 1..25: mol_type = unassigned RNA
tgcttcggggaaacagccaggaaaa

SEQ ID NO: 5093 - RNA, 25 nt, Homo sapiens
  source 1..25: mol_type = unassigned RNA
ggaaaatggtcaagattatttttag

SEQ ID NO: 5094 - RNA, 25 nt, Homo sapiens
  source 1..25: mol_type = unassigned RNA
agattatttttagaggttattttat

SEQ ID NO: 5095 - RNA, 25 nt, Homo sapiens
  source 1..25: mol_type = unassigned RNA
gattatttttagaggttattttatt

SEQ ID NO: 5096 - RNA, 25 nt, Homo sapiens
  source 1..25: mol_type = unassigned RNA
attatttttagaggttattttattg

SEQ ID NO: 5097 - RNA, 25 nt, Homo sapiens
  source 1..25: mol_type = unassigned RNA
taacatcttgagttatttttaattc

SEQ ID NO: 5098 - RNA, 25 nt, Homo sapiens
  source 1..25: mol_type = unassigned RNA
aacatcttgagttatttttaattca

SEQ ID NO: 5099 - RNA, 25 nt, Homo sapiens
  source 1..25: mol_type = unassigned RNA
acatcttgagttatttttaattcag

SEQ ID NO: 5100 - RNA, 25 nt, Homo sapiens
  source 1..25: mol_type = unassigned RNA
catcttgagttatttttaattcagg

SEQ ID NO: 5101 - RNA, 25 nt, Homo sapiens
  source 1..25: mol_type = unassigned RNA
gagttatttttaattcagggggatg

SEQ ID NO: 5102 - RNA, 25 nt, Homo sapiens
  source 1..25: mol_type = unassigned RNA
atttttaattcagggggatgtggaa

SEQ ID NO: 5103 - RNA, 25 nt, Homo sapiens
  source 1..25: mol_type = unassigned RNA
gttttgttgtagcttagtatccata

SEQ ID NO: 5104 - RNA, 25 nt, Homo sapiens
  source 1..25: mol_type = unassigned RNA
ttttgttgtagcttagtatccataa

SEQ ID NO: 5105 - RNA, 25 nt, Homo sapiens
  source 1..25: mol_type = unassigned RNA
gcagcttttgttttctgtatgttgt

SEQ ID NO: 5106 - RNA, 25 nt, Homo sapiens
  source 1..25: mol_type = unassigned RNA
cagcttttgttttctgtatgttgtt

SEQ ID NO: 5107 - RNA, 25 nt, Homo sapiens
  source 1..25: mol_type = unassigned RNA
agcttttgttttctgtatgttgttg

SEQ ID NO: 5108 - RNA, 25 nt, Homo sapiens
  source 1..25: mol_type = unassigned RNA
gcttttgttttctgtatgttgttgg

SEQ ID NO: 5109 - RNA, 25 nt, Homo sapiens
  source 1..25: mol_type = unassigned RNA
tcaactttcacacatagcaagcaca

SEQ ID NO: 5110 - RNA, 25 nt, Homo sapiens
  source 1..25: mol_type = unassigned RNA
gcaagcacatggcctccctgatgtc

SEQ ID NO: 5111 - RNA, 25 nt, Homo sapiens
  source 1..25: mol_type = unassigned RNA
tccctgatgtcaggatgcctttgtt

SEQ ID NO: 5112 - RNA, 25 nt, Homo sapiens
  source 1..25: mol_type = unassigned RNA
ctaaaaatttgttcctttttcacta

SEQ ID NO: 5113 - RNA, 25 nt, Homo sapiens
  source 1..25: mol_type = unassigned RNA
taaaaatttgttcctttttcactat

SEQ ID NO: 5114 - RNA, 25 nt, Homo sapiens
  source 1..25: mol_type = unassigned RNA
tttttcactatgggcagttcacaca

SEQ ID NO: 5115 - RNA, 25 nt, Homo sapiens
  source 1..25: mol_type = unassigned RNA
cacaaggcaaaaactattgaacagt

SEQ ID NO: 5116 - RNA, 25 nt, Homo sapiens
  source 1..25: mol_type = unassigned RNA
tgattcttttattaataaaagctaa

SEQ ID NO: 5117 - RNA, 25 nt, Homo sapiens
  source 1..25: mol_type = unassigned RNA
gattcttttattaataaaagctaat

SEQ ID NO: 5118 - RNA, 25 nt, Homo sapiens
  source 1..25: mol_type = unassigned RNA
tttattaataaaagctaatgggaaa

SEQ ID NO: 5119 - RNA, 25 nt, Homo sapiens
  source 1..25: mol_type = unassigned RNA
tttattgataaatctatcctttaaa

SEQ ID NO: 5120 - RNA, 25 nt, Homo sapiens
  source 1..25: mol_type = unassigned RNA
ctatcctttaaaaggaatacgtttt

SEQ ID NO: 5121 - RNA, 25 nt, Homo sapiens
  source 1..25: mol_type = unassigned RNA
aatagtttatgtagagaaacattag

SEQ ID NO: 5122 - RNA, 25 nt, Homo sapiens
  source 1..25: mol_type = unassigned RNA
ttaattgtctccccacctatattta

SEQ ID NO: 5123 - RNA, 25 nt, Homo sapiens
  source 1..25: mol_type = unassigned RNA
taattgtctccccacctatatttat

SEQ ID NO: 5124 - RNA, 25 nt, Homo sapiens
  source 1..25: mol_type = unassigned RNA
agtaaaagtgtatttgtaaactgta

SEQ ID NO: 5125 - RNA, 25 nt, Homo sapiens
  source 1..25: mol_type = unassigned RNA
gtaaaagtgtatttgtaaactgtat

SEQ ID NO: 5126 - RNA, 25 nt, Homo sapiens
  source 1..25: mol_type = unassigned RNA
gtaaactgtatgggaactaaaaatt

SEQ ID NO: 5127 - RNA, 25 nt, Homo sapiens
  source 1..25: mol_type = unassigned RNA
ggaataaaaccattttcttatatga

SEQ ID NO: 5128 - RNA, 25 nt, Homo sapiens
  source 1..25: mol_type = unassigned RNA
gggagagggtgaaagtccacatctg

SEQ ID NO: 5129 - RNA, 25 nt, Homo sapiens
  source 1..25: mol_type = unassigned RNA
agggagagggtgaaagtccacatct

SEQ ID NO: 5130 - RNA, 25 nt, Homo sapiens
  source 1..25: mol_type = unassigned RNA
tagggagagggtgaaagtccacatc

SEQ ID NO: 5131 - RNA, 25 nt, Homo sapiens
  source 1..25: mol_type = unassigned RNA
tctgttcttgatctttttagggaga

SEQ ID NO: 5132 - RNA, 25 nt, Homo sapiens
  source 1..25: mol_type = unassigned RNA
gtctgttcttgatctttttagggag

SEQ ID NO: 5133 - RNA, 25 nt, Homo sapiens
  source 1..25: mol_type = unassigned RNA
cttgcgtctgttcttgatcttttta

SEQ ID NO: 5134 - RNA, 25 nt, Homo sapiens
  source 1..25: mol_type = unassigned RNA
tcttgcgtctgttcttgatcttttt

SEQ ID NO: 5135 - RNA, 25 nt, Homo sapiens
  source 1..25: mol_type = unassigned RNA
atggtttcaaattttgcttatcaaa

SEQ ID NO: 5136 - RNA, 25 nt, Homo sapiens
  source 1..25: mol_type = unassigned RNA
gagttaaaatacagtggtctttaaa

SEQ ID NO: 5137 - RNA, 25 nt, Homo sapiens
  source 1..25: mol_type = unassigned RNA
caggtattgttgagttaaaatacag

SEQ ID NO: 5138 - RNA, 25 nt, Homo sapiens
  source 1..25: mol_type = unassigned RNA
ctgaggaaatgagtaattgggaagc

SEQ ID NO: 5139 - RNA, 25 nt, Homo sapiens
  source 1..25: mol_type = unassigned RNA
ttcttatctgaggaaatgagtaatt

SEQ ID NO: 5140 - RNA, 25 nt, Homo sapiens
  source 1..25: mol_type = unassigned RNA
cttcttatctgaggaaatgagtaat

SEQ ID NO: 5141 - RNA, 25 nt, Homo sapiens
  source 1..25: mol_type = unassigned RNA
tgtagagatgatttcttcttatctg

SEQ ID NO: 5142 - RNA, 25 nt, Homo sapiens
  source 1..25: mol_type = unassigned RNA
ggaaaaaaaaaattaaactggttaa

SEQ ID NO: 5143 - RNA, 25 nt, Homo sapiens
  source 1..25: mol_type = unassigned RNA
aggaaaaaaaaaattaaactggtta

SEQ ID NO: 5144 - RNA, 25 nt, Homo sapiens
  source 1..25: mol_type = unassigned RNA
acaatgaggaaaaaaaaaattaaac

SEQ ID NO: 5145 - RNA, 25 nt, Homo sapiens
  source 1..25: mol_type = unassigned RNA
tttcttctcatcatccccaacaatg

SEQ ID NO: 5146 - RNA, 25 nt, Homo sapiens
  source 1..25: mol_type = unassigned RNA
taaatgagattgttctcacttttct

SEQ ID NO: 5147 - RNA, 25 nt, Homo sapiens
  source 1..25: mol_type = unassigned RNA
gaattatccactactggatacatga

SEQ ID NO: 5148 - RNA, 25 nt, Homo sapiens
  source 1..25: mol_type = unassigned RNA
gccatcaaaatgaattatccactac

SEQ ID NO: 5149 - RNA, 25 nt, Homo sapiens
  source 1..25: mol_type = unassigned RNA
ctcaggcactggcttaattctcatt

SEQ ID NO: 5150 - RNA, 25 nt, Homo sapiens
  source 1..25: mol_type = unassigned RNA
gtcaacttctgacagtctcaggcac

SEQ ID NO: 5151 - RNA, 25 nt, Homo sapiens
  source 1..25: mol_type = unassigned RNA
gcaaaggtcaacttctgacagtctc

SEQ ID NO: 5152 - RNA, 25 nt, Homo sapiens
  source 1..25: mol_type = unassigned RNA
ctatgactctttaatgccagtgcaa

SEQ ID NO: 5153 - RNA, 25 nt, Homo sapiens
  source 1..25: mol_type = unassigned RNA
agccgaactataattggtcaacggc

SEQ ID NO: 5154 - RNA, 25 nt, Homo sapiens
  source 1..25: mol_type = unassigned RNA
caacagccgaactataattggtcaa

SEQ ID NO: 5155 - RNA, 25 nt, Homo sapiens
  source 1..25: mol_type = unassigned RNA
tctcagtcaacagccgaactataat

SEQ ID NO: 5156 - RNA, 25 nt, Homo sapiens
  source 1..25: mol_type = unassigned RNA
caattattcaaatgcaaagaaaata

SEQ ID NO: 5157 - RNA, 25 nt, Homo sapiens
  source 1..25: mol_type = unassigned RNA
tcgttgttttggcgaccaaaaacac

SEQ ID NO: 5158 - RNA, 25 nt, Homo sapiens
  source 1..25: mol_type = unassigned RNA
aaccctattcaaacagtcgttgttt

SEQ ID NO: 5159 - RNA, 25 nt, Homo sapiens
  source 1..25: mol_type = unassigned RNA
cgaacactgaacaaatcattcatct

SEQ ID NO: 5160 - RNA, 25 nt, Homo sapiens
  source 1..25: mol_type = unassigned RNA
ccgaacactgaacaaatcattcatc

SEQ ID NO: 5161 - RNA, 25 nt, Homo sapiens
  source 1..25: mol_type = unassigned RNA
tggttgtgaccgtctgttagactag

SEQ ID NO: 5162 - RNA, 25 nt, Homo sapiens
  source 1..25: mol_type = unassigned RNA
taatatccttggttttccatggcac

SEQ ID NO: 5163 - RNA, 25 nt, Homo sapiens
  source 1..25: mol_type = unassigned RNA
ttttgctaatatccttggttttcca

SEQ ID NO: 5164 - RNA, 25 nt, Homo sapiens
  source 1..25: mol_type = unassigned RNA
caacttctgcttttgctaatatcct

SEQ ID NO: 5165 - RNA, 25 nt, Homo sapiens
  source 1..25: mol_type = unassigned RNA
tactgtaagcagcttcggcttccca

SEQ ID NO: 5166 - RNA, 25 nt, Homo sapiens
  source 1..25: mol_type = unassigned RNA
ttgtcccagctactgtaagcagctt

SEQ ID NO: 5167 - RNA, 25 nt, Homo sapiens
  source 1..25: mol_type = unassigned RNA
agaaatcattcaggaagcttcttga

SEQ ID NO: 5168 - RNA, 25 nt, Homo sapiens
  source 1..25: mol_type = unassigned RNA
ggctcagggctagcagaaatcattc

SEQ ID NO: 5169 - RNA, 25 nt, Homo sapiens
  source 1..25: mol_type = unassigned RNA
agtgctggttccaaaaataggctca

SEQ ID NO: 5170 - RNA, 25 nt, Homo sapiens
  source 1..25: mol_type = unassigned RNA
aagtgctggttccaaaaataggctc

SEQ ID NO: 5171 - RNA, 25 nt, Homo sapiens
  source 1..25: mol_type = unassigned RNA
ttccccaagtgctggttccaaaaat

SEQ ID NO: 5172 - RNA, 25 nt, Homo sapiens
  source 1..25: mol_type = unassigned RNA
tcacaagatcagtttccccaagtgc

SEQ ID NO: 5173 - RNA, 25 nt, Homo sapiens
  source 1..25: mol_type = unassigned RNA
caagtctggggatgccccagtgggg

SEQ ID NO: 5174 - RNA, 25 nt, Homo sapiens
  source 1..25: mol_type = unassigned RNA
tcccaagtctggggatgccccagtg

SEQ ID NO: 5175 - RNA, 25 nt, Homo sapiens
  source 1..25: mol_type = unassigned RNA
ttcccaagtctggggatgccccagt

SEQ ID NO: 5176 - RNA, 25 nt, Homo sapiens
  source 1..25: mol_type = unassigned RNA
tttcccaagtctggggatgccccag

SEQ ID NO: 5177 - RNA, 25 nt, Homo sapiens
  source 1..25: mol_type = unassigned RNA
gaaagagtcacgtttcccaagtctg

SEQ ID NO: 5178 - RNA, 25 nt, Homo sapiens
  source 1..25: mol_type = unassigned RNA
agaaagagtcacgtttcccaagtct

SEQ ID NO: 5179 - RNA, 25 nt, Homo sapiens
  source 1..25: mol_type = unassigned RNA
aagaaagagtcacgtttcccaagtc

SEQ ID NO: 5180 - RNA, 25 nt, Homo sapiens
  source 1..25: mol_type = unassigned RNA
tcactgtggcctgactaaaacccag

SEQ ID NO: 5181 - RNA, 25 nt, Homo sapiens
  source 1..25: mol_type = unassigned RNA
ctgttagggctgttccttctcactg

SEQ ID NO: 5182 - RNA, 25 nt, Homo sapiens
  source 1..25: mol_type = unassigned RNA
attcaacctggctggaggcctgtta

SEQ ID NO: 5183 - RNA, 25 nt, Homo sapiens
  source 1..25: mol_type = unassigned RNA
cattcaacctggctggaggcctgtt

SEQ ID NO: 5184 - RNA, 25 nt, Homo sapiens
  source 1..25: mol_type = unassigned RNA
aaatgagctcattcaacctggctgg

SEQ ID NO: 5185 - RNA, 25 nt, Homo sapiens
  source 1..25: mol_type = unassigned RNA
caaaaatgagctcattcaacctggc

SEQ ID NO: 5186 - RNA, 25 nt, Homo sapiens
  source 1..25: mol_type = unassigned RNA
acaacaaaaatgagctcattcaacc

SEQ ID NO: 5187 - RNA, 25 nt, Homo sapiens
  source 1..25: mol_type = unassigned RNA
tagaacattagcaaatcttactggt

SEQ ID NO: 5188 - RNA, 25 nt, Homo sapiens
  source 1..25: mol_type = unassigned RNA
aatgtagaacattagcaaatcttac

SEQ ID NO: 5189 - RNA, 25 nt, Homo sapiens
  source 1..25: mol_type = unassigned RNA
aggcaaagagggatgtctttggaga

SEQ ID NO: 5190 - RNA, 25 nt, Homo sapiens
  source 1..25: mol_type = unassigned RNA
catatgaggcaaagagggatgtctt

SEQ ID NO: 5191 - RNA, 25 nt, Homo sapiens
  source 1..25: mol_type = unassigned RNA
gatgattcaacatatgaggcaaaga

SEQ ID NO: 5192 - RNA, 25 nt, Homo sapiens
  source 1..25: mol_type = unassigned RNA
ggatgattcaacatatgaggcaaag

SEQ ID NO: 5193 - RNA, 25 nt, Homo sapiens
  source 1..25: mol_type = unassigned RNA
tccgcactggatgattcaacatatg

SEQ ID NO: 5194 - RNA, 25 nt, Homo sapiens
  source 1..25: mol_type = unassigned RNA
gatattttcattgaaatatccgcac

SEQ ID NO: 5195 - RNA, 25 nt, Homo sapiens
  source 1..25: mol_type = unassigned RNA
agaatccaaggaggccacaacttca

SEQ ID NO: 5196 - RNA, 25 nt, Homo sapiens
  source 1..25: mol_type = unassigned RNA
aagccaaagtcagaagaatccaagg

SEQ ID NO: 5197 - RNA, 25 nt, Homo sapiens
  source 1..25: mol_type = unassigned RNA
cagaagccaaagtcagaagaatcca

SEQ ID NO: 5198 - RNA, 25 nt, Homo sapiens
  source 1..25: mol_type = unassigned RNA
aggaactaccaccagggctggatct

SEQ ID NO: 5199 - RNA, 25 nt, Homo sapiens
  source 1..25: mol_type = unassigned RNA
ctcagaaaggaactaccaccagggc

SEQ ID NO: 5200 - RNA, 25 nt, Homo sapiens
  source 1..25: mol_type = unassigned RNA
agacctcagaaaggaactaccacca

SEQ ID NO: 5201 - RNA, 25 nt, Homo sapiens
  source 1..25: mol_type = unassigned RNA
gagacctcagaaaggaactaccacc

SEQ ID NO: 5202 - RNA, 25 nt, Homo sapiens
  source 1..25: mol_type = unassigned RNA
ctcaagggactgagagacctcagaa

SEQ ID NO: 5203 - RNA, 25 nt, Homo sapiens
  source 1..25: mol_type = unassigned RNA
cagccaaactaccccaaagtctcaa

SEQ ID NO: 5204 - RNA, 25 nt, Homo sapiens
  source 1..25: mol_type = unassigned RNA
gcagccaaactaccccaaagtctca

SEQ ID NO: 5205 - RNA, 25 nt, Homo sapiens
  source 1..25: mol_type = unassigned RNA
ctgatatacattttgtcagtgagaa

SEQ ID NO: 5206 - RNA, 25 nt, Homo sapiens
  source 1..25: mol_type = unassigned RNA
aaggaatattggggggtggaggtgg

SEQ ID NO: 5207 - RNA, 25 nt, Homo sapiens
  source 1..25: mol_type = unassigned RNA
caaggaatattggggggtggaggtg

SEQ ID NO: 5208 - RNA, 25 nt, Homo sapiens
  source 1..25: mol_type = unassigned RNA
tcaaggaatattggggggtggaggt

SEQ ID NO: 5209 - RNA, 25 nt, Homo sapiens
  source 1..25: mol_type = unassigned RNA
ttcaaggaatattggggggtggagg

SEQ ID NO: 5210 - RNA, 25 nt, Homo sapiens
  source 1..25: mol_type = unassigned RNA
aagttcaaggaatattggggggtgg

SEQ ID NO: 5211 - RNA, 25 nt, Homo sapiens
  source 1..25: mol_type = unassigned RNA
tcaaagttcaaggaatattgggggg

SEQ ID NO: 5212 - RNA, 25 nt, Homo sapiens
  source 1..25: mol_type = unassigned RNA
aattcaaagttcaaggaatattggg

SEQ ID NO: 5213 - RNA, 25 nt, Homo sapiens
  source 1..25: mol_type = unassigned RNA
caattcaaagttcaaggaatattgg

SEQ ID NO: 5214 - RNA, 25 nt, Homo sapiens
  source 1..25: mol_type = unassigned RNA
gcaattcaaagttcaaggaatattg

SEQ ID NO: 5215 - RNA, 25 nt, Homo sapiens
  source 1..25: mol_type = unassigned RNA
agcaattcaaagttcaaggaatatt

SEQ ID NO: 5216 - RNA, 25 nt, Homo sapiens
  source 1..25: mol_type = unassigned RNA
aagcaattcaaagttcaaggaatat

SEQ ID NO: 5217 - RNA, 25 nt, Homo sapiens
  source 1..25: mol_type = unassigned RNA
gtgttctgaagcaattcaaagttca

SEQ ID NO: 5218 - RNA, 25 nt, Homo sapiens
  source 1..25: mol_type = unassigned RNA
acttccctaataagggaataccttc

SEQ ID NO: 5219 - RNA, 25 nt, Homo sapiens
  source 1..25: mol_type = unassigned RNA
gacagcagtgacacttccctaataa

SEQ ID NO: 5220 - RNA, 25 nt, Homo sapiens
  source 1..25: mol_type = unassigned RNA
agacagcagtgacacttccctaata

SEQ ID NO: 5221 - RNA, 25 nt, Homo sapiens
  source 1..25: mol_type = unassigned RNA
aagcttcttgctgcaaatactgaac

SEQ ID NO: 5222 - RNA, 25 nt, Homo sapiens
  source 1..25: mol_type = unassigned RNA
aagtcaagacaaaaccaaagcaaaa

SEQ ID NO: 5223 - RNA, 25 nt, Homo sapiens
  source 1..25: mol_type = unassigned RNA
tttgtacaatcaaactcttgtgtgc

SEQ ID NO: 5224 - RNA, 25 nt, Homo sapiens
  source 1..25: mol_type = unassigned RNA
ataaaagcaactgatcttaagcaac

SEQ ID NO: 5225 - RNA, 25 nt, Homo sapiens
  source 1..25: mol_type = unassigned RNA
tcttataacaaaactagccaagatc

SEQ ID NO: 5226 - RNA, 25 nt, Homo sapiens
  source 1..25: mol_type = unassigned RNA
catgatagtttgctgacctcgtgga

SEQ ID NO: 5227 - RNA, 25 nt, Homo sapiens
  source 1..25: mol_type = unassigned RNA
acatgatagtttgctgacctcgtgg

SEQ ID NO: 5228 - RNA, 25 nt, Homo sapiens
  source 1..25: mol_type = unassigned RNA
agaacatgatagtttgctgacctcg

SEQ ID NO: 5229 - RNA, 25 nt, Homo sapiens
  source 1..25: mol_type = unassigned RNA
ctagggactatgataactctggcct

SEQ ID NO: 5230 - RNA, 25 nt, Homo sapiens
  source 1..25: mol_type = unassigned RNA
agcaacctagggactatgataactc

SEQ ID NO: 5231 - RNA, 25 nt, Homo sapiens
  source 1..25: mol_type = unassigned RNA
gcacatgataagccgtagcaaccta

SEQ ID NO: 5232 - RNA, 25 nt, Homo sapiens
  source 1..25: mol_type = unassigned RNA
agcacatgataagccgtagcaacct

SEQ ID NO: 5233 - RNA, 25 nt, Homo sapiens
  source 1..25: mol_type = unassigned RNA
ctgacttcctcagaaaccacctctt

SEQ ID NO: 5234 - RNA, 25 nt, Homo sapiens
  source 1..25: mol_type = unassigned RNA
acccattactgactgctctggccct

SEQ ID NO: 5235 - RNA, 25 nt, Homo sapiens
  source 1..25: mol_type = unassigned RNA
cacccattactgactgctctggccc

SEQ ID NO: 5236 - RNA, 25 nt, Homo sapiens
  source 1..25: mol_type = unassigned RNA
ctcattcacccattactgactgctc

SEQ ID NO: 5237 - RNA, 25 nt, Homo sapiens
  source 1..25: mol_type = unassigned RNA
tacccaccagcaacctagaagtaga

SEQ ID NO: 5238 - RNA, 25 nt, Homo sapiens
  source 1..25: mol_type = unassigned RNA
taattttaaaatcctcagtgagcta

SEQ ID NO: 5239 - RNA, 25 nt, Homo sapiens
  source 1..25: mol_type = unassigned RNA
aaaaagttattaagactgtgaaatt

SEQ ID NO: 5240 - RNA, 25 nt, Homo sapiens
  source 1..25: mol_type = unassigned RNA
cataagtttcagaagggccacacac

SEQ ID NO: 5241 - RNA, 25 nt, Homo sapiens
  source 1..25: mol_type = unassigned RNA
ggagagatgaccataagtttcagaa

SEQ ID NO: 5242 - RNA, 25 nt, Homo sapiens
  source 1..25: mol_type = unassigned RNA
gggagagatgaccataagtttcaga

SEQ ID NO: 5243 - RNA, 25 nt, Homo sapiens
  source 1..25: mol_type = unassigned RNA
catttgaaaagaccttggtttcagt

SEQ ID NO: 5244 - RNA, 25 nt, Homo sapiens
  source 1..25: mol_type = unassigned RNA
acatttgaaaagaccttggtttcag

SEQ ID NO: 5245 - RNA, 25 nt, Homo sapiens
  source 1..25: mol_type = unassigned RNA
catttagccacatttgaaaagacct

SEQ ID NO: 5246 - RNA, 25 nt, Homo sapiens
  source 1..25: mol_type = unassigned RNA
tcctggctgtttccccgaagcaact

SEQ ID NO: 5247 - RNA, 25 nt, Homo sapiens
  source 1..25: mol_type = unassigned RNA
ctaaaaataatcttgaccattttcc

SEQ ID NO: 5248 - RNA, 25 nt, Homo sapiens
  source 1..25: mol_type = unassigned RNA
atgtctatagtctaagtttccctta

SEQ ID NO: 5249 - RNA, 25 nt, Homo sapiens
  source 1..25: mol_type = unassigned RNA
aacatacagaaaacaaaagctgcac

SEQ ID NO: 5250 - RNA, 25 nt, Homo sapiens
  source 1..25: mol_type = unassigned RNA
taacaaaggcatcctgacatcaggg

SEQ ID NO: 5251 - RNA, 25 nt, Homo sapiens
  source 1..25: mol_type = unassigned RNA
tcctaacaaaggcatcctgacatca

SEQ ID NO: 5252 - RNA, 25 nt, Homo sapiens
  source 1..25: mol_type = unassigned RNA
atcctaacaaaggcatcctgacatc

SEQ ID NO: 5253 - RNA, 25 nt, Homo sapiens
  source 1..25: mol_type = unassigned RNA
taagggcaaatacagatcctaacaa

SEQ ID NO: 5254 - RNA, 25 nt, Homo sapiens
  source 1..25: mol_type = unassigned RNA
ggaaaaaagatttcaacaaaattaa

SEQ ID NO: 5255 - RNA, 25 nt, Homo sapiens
  source 1..25: mol_type = unassigned RNA
aggaaaaaagatttcaacaaaatta

SEQ ID NO: 5256 - RNA, 25 nt, Homo sapiens
  source 1..25: mol_type = unassigned RNA
attttggaacttttcaagaggaaga

SEQ ID NO: 5257 - RNA, 25 nt, Homo sapiens
  source 1..25: mol_type = unassigned RNA
aaactatattttggaacttttcaag

SEQ ID NO: 5258 - RNA, 25 nt, Homo sapiens
  source 1..25: mol_type = unassigned RNA
atgaaagatacaataaactatattt

SEQ ID NO: 5259 - RNA, 25 nt, Homo sapiens
  source 1..25: mol_type = unassigned RNA
ttgtgtgaactgcccatagtgaaaa

SEQ ID NO: 5260 - RNA, 25 nt, Homo sapiens
  source 1..25: mol_type = unassigned RNA
ttattaattacatgatttgaggctt

SEQ ID NO: 5261 - RNA, 25 nt, Homo sapiens
  source 1..25: mol_type = unassigned RNA
ggcaaattattaattacatgatttg

SEQ ID NO: 5262 - RNA, 25 nt, Homo sapiens
  source 1..25: mol_type = unassigned RNA
aatcacaattaggtcataaataaac

SEQ ID NO: 5263 - RNA, 25 nt, Homo sapiens
  source 1..25: mol_type = unassigned RNA
ttttattaataaaagaatcacaatt

SEQ ID NO: 5264 - RNA, 25 nt, Homo sapiens
  source 1..25: mol_type = unassigned RNA
gtaggtctagtcatcagcttaatca

SEQ ID NO: 5265 - RNA, 25 nt, Homo sapiens
  source 1..25: mol_type = unassigned RNA
tgtaggtctagtcatcagcttaatc

SEQ ID NO: 5266 - RNA, 25 nt, Homo sapiens
  source 1..25: mol_type = unassigned RNA
catatactgcaggaaaattaattgt

SEQ ID NO: 5267 - RNA, 25 nt, Homo sapiens
  source 1..25: mol_type = unassigned RNA
tctggtacaatacttcatatactgc

SEQ ID NO: 5268 - RNA, 25 nt, Homo sapiens
  source 1..25: mol_type = unassigned RNA
aaatattacatatcttttaatactc

SEQ ID NO: 5269 - RNA, 25 nt, Homo sapiens
  source 1..25: mol_type = unassigned RNA
acatcctaaaacgtattccttttaa

SEQ ID NO: 5270 - RNA, 25 nt, Homo sapiens
  source 1..25: mol_type = unassigned RNA
gactacataatatacgtgggcaaaa

SEQ ID NO: 5271 - RNA, 25 nt, Homo sapiens
  source 1..25: mol_type = unassigned RNA
tgcaaatagactacataatatacgt

SEQ ID NO: 5272 - RNA, 25 nt, Homo sapiens
  source 1..25: mol_type = unassigned RNA
ttgcaaatagactacataatatacg

SEQ ID NO: 5273 - RNA, 25 nt, Homo sapiens
  source 1..25: mol_type = unassigned RNA
gcgctaacacccataaatataggtg

SEQ ID NO: 5274 - RNA, 25 nt, Homo sapiens
  source 1..25: mol_type = unassigned RNA
tgcgctaacacccataaatataggt

SEQ ID NO: 5275 - RNA, 25 nt, Homo sapiens
  source 1..25: mol_type = unassigned RNA
ttgcgctaacacccataaatatagg

SEQ ID NO: 5276 - RNA, 25 nt, Homo sapiens
  source 1..25: mol_type = unassigned RNA
cagttgcgctaacacccataaatat

SEQ ID NO: 5277 - RNA, 25 nt, Homo sapiens
  source 1..25: mol_type = unassigned RNA
cgacaaatgccatcatataagaaaa

SEQ ID NO: 5278 - RNA, 25 nt, Homo sapiens
  source 1..25: mol_type = unassigned RNA
cccggccttcacgtgacctggcgtg

SEQ ID NO: 5279 - RNA, 25 nt, Homo sapiens
  source 1..25: mol_type = unassigned RNA
tgacctggcgtgcggagcgcgcacg

SEQ ID NO: 5280 - RNA, 25 nt, Homo sapiens
  source 1..25: mol_type = unassigned RNA
gacctggcgtgcggagcgcgcacgc

SEQ ID NO: 5281 - RNA, 25 nt, Homo sapiens
  source 1..25: mol_type = unassigned RNA
ggagcgcgcacgcgggaacccgcgc

SEQ ID NO: 5282 - RNA, 25 nt, Homo sapiens
  source 1..25: mol_type = unassigned RNA
gcgcgcacgcgggaacccgcgctgg

SEQ ID NO: 5283 - RNA, 25 nt, Homo sapiens
  source 1..25: mol_type = unassigned RNA
cgcacgcgggaacccgcgctggagg

SEQ ID NO: 5284 - RNA, 25 nt, Homo sapiens
  source 1..25: mol_type = unassigned RNA
gcacgcgggaacccgcgctggaggc

SEQ ID NO: 5285 - RNA, 25 nt, Homo sapiens
  source 1..25: mol_type = unassigned RNA
cgggaacccgcgctggaggcgggcg

SEQ ID NO: 5286 - RNA, 25 nt, Homo sapiens
  source 1..25: mol_type = unassigned RNA
gggaacccgcgctggaggcgggcga

SEQ ID NO: 5287 - RNA, 25 nt, Homo sapiens
  source 1..25: mol_type = unassigned RNA
ccgcgctggaggcgggcgagggccg

SEQ ID NO: 5288 - RNA, 25 nt, Homo sapiens
  source 1..25: mol_type = unassigned RNA
cgcgctggaggcgggcgagggccga

SEQ ID NO: 5289 - RNA, 25 nt, Homo sapiens
  source 1..25: mol_type = unassigned RNA
gcgctggaggcgggcgagggccgag

SEQ ID NO: 5290 - RNA, 25 nt, Homo sapiens
  source 1..25: mol_type = unassigned RNA
ggcgggcgagggccgaggggcagct

SEQ ID NO: 5291 - RNA, 25 nt, Homo sapiens
  source 1..25: mol_type = unassigned RNA
gcgggcgagggccgaggggcagcta

SEQ ID NO: 5292 - RNA, 25 nt, Homo sapiens
  source 1..25: mol_type = unassigned RNA
agggccgaggggcagctagggagcg

SEQ ID NO: 5293 - RNA, 25 nt, Homo sapiens
  source 1..25: mol_type = unassigned RNA
aggggcagctagggagcgcggcttg

SEQ ID NO: 5294 - RNA, 25 nt, Homo sapiens
  source 1..25: mol_type = unassigned RNA
ggcagctagggagcgcggcttgagg

SEQ ID NO: 5295 - RNA, 25 nt, Homo sapiens
  source 1..25: mol_type = unassigned RNA
gcagctagggagcgcggcttgagga

SEQ ID NO: 5296 - RNA, 25 nt, Homo sapiens
  source 1..25: mol_type = unassigned RNA
gctagggagcgcggcttgaggaggg

SEQ ID NO: 5297 - RNA, 25 nt, Homo sapiens
  source 1..25: mol_type = unassigned RNA
ctagggagcgcggcttgaggagggc

SEQ ID NO: 5298 - RNA, 25 nt, Homo sapiens
  source 1..25: mol_type = unassigned RNA
tagggagcgcggcttgaggagggcg

SEQ ID NO: 5299 - RNA, 25 nt, Homo sapiens
  source 1..25: mol_type = unassigned RNA
cttgaggagggcggggccgccccgc

SEQ ID NO: 5300 - RNA, 25 nt, Homo sapiens
  source 1..25: mol_type = unassigned RNA
gccaaagtcaaaccccgacacccgc

SEQ ID NO: 5301 - RNA, 25 nt, Homo sapiens
  source 1..25: mol_type = unassigned RNA
aaagtcaaaccccgacacccgccgg

SEQ ID NO: 5302 - RNA, 25 nt, Homo sapiens
  source 1..25: mol_type = unassigned RNA
aagtcaaaccccgacacccgccggc

SEQ ID NO: 5303 - RNA, 25 nt, Homo sapiens
  source 1..25: mol_type = unassigned RNA
caaaccccgacacccgccggcgggc

SEQ ID NO: 5304 - RNA, 25 nt, Homo sapiens
  source 1..25: mol_type = unassigned RNA
gggccggtgagctcactagctgacc

SEQ ID NO: 5305 - RNA, 25 nt, Homo sapiens
  source 1..25: mol_type = unassigned RNA
cggtgagctcactagctgacccggc

SEQ ID NO: 5306 - RNA, 25 nt, Homo sapiens
  source 1..25: mol_type = unassigned RNA
agctcactagctgacccggcaggtc

SEQ ID NO: 5307 - RNA, 25 nt, Homo sapiens
  source 1..25: mol_type = unassigned RNA
ctagctgacccggcaggtcaggatc

SEQ ID NO: 5308 - RNA, 25 nt, Homo sapiens
  source 1..25: mol_type = unassigned RNA
cccggcaggtcaggatctggcttag

SEQ ID NO: 5309 - RNA, 25 nt, Homo sapiens
  source 1..25: mol_type = unassigned RNA
ccgcgagctccagtgcgcgcacccg

SEQ ID NO: 5310 - RNA, 25 nt, Homo sapiens
  source 1..25: mol_type = unassigned RNA
gtggccgcctcccagccctctttgc

SEQ ID NO: 5311 - RNA, 25 nt, Homo sapiens
  source 1..25: mol_type = unassigned RNA
ccagccctctttgccggacgagctc

SEQ ID NO: 5312 - RNA, 25 nt, Homo sapiens
  source 1..25: mol_type = unassigned RNA
cagccctctttgccggacgagctct

SEQ ID NO: 5313 - RNA, 25 nt, Homo sapiens
  source 1..25: mol_type = unassigned RNA
cgagctctgggccgccacaagacta

SEQ ID NO: 5314 - RNA, 25 nt, Homo sapiens
  source 1..25: mol_type = unassigned RNA
tctgggccgccacaagactaaggaa

SEQ ID NO: 5315 - RNA, 25 nt, Homo sapiens
  source 1..25: mol_type = unassigned RNA
tgcccgtctttctcagccagctctg

SEQ ID NO: 5316 - RNA, 25 nt, Homo sapiens
  source 1..25: mol_type = unassigned RNA
gcccgtctttctcagccagctctga

SEQ ID NO: 5317 - RNA, 25 nt, Homo sapiens
  source 1..25: mol_type = unassigned RNA
cccgtctttctcagccagctctgag

SEQ ID NO: 5318 - RNA, 25 nt, Homo sapiens
  source 1..25: mol_type = unassigned RNA
cccgcatcaagaaaatctccatcga

SEQ ID NO: 5319 - RNA, 25 nt, Homo sapiens
  source 1..25: mol_type = unassigned RNA
ccgcatcaagaaaatctccatcgaa

SEQ ID NO: 5320 - RNA, 25 nt, Homo sapiens
  source 1..25: mol_type = unassigned RNA
agaaaatctccatcgaagggaacat

SEQ ID NO: 5321 - RNA, 25 nt, Homo sapiens
  source 1..25: mol_type = unassigned RNA
atctccatcgaagggaacatcggta

SEQ ID NO: 5322 - RNA, 25 nt, Homo sapiens
  source 1..25: mol_type = unassigned RNA
gaagggaacatcggtaaggagcctc

SEQ ID NO: 5323 - RNA, 25 nt, Homo sapiens
  source 1..25: mol_type = unassigned RNA
catcggtaaggagcctccggaaatg

SEQ ID NO: 5324 - RNA, 25 nt, Homo sapiens
  source 1..25: mol_type = unassigned RNA
atcggtaaggagcctccggaaatgt

SEQ ID NO: 5325 - RNA, 25 nt, Homo sapiens
  source 1..25: mol_type = unassigned RNA
cgcacgccaggtcacgtgaaggccg

SEQ ID NO: 5326 - RNA, 25 nt, Homo sapiens
  source 1..25: mol_type = unassigned RNA
ccgcacgccaggtcacgtgaaggcc

SEQ ID NO: 5327 - RNA, 25 nt, Homo sapiens
  source 1..25: mol_type = unassigned RNA
tccgcacgccaggtcacgtgaaggc

SEQ ID NO: 5328 - RNA, 25 nt, Homo sapiens
  source 1..25: mol_type = unassigned RNA
gcgctccgcacgccaggtcacgtga

SEQ ID NO: 5329 - RNA, 25 nt, Homo sapiens
  source 1..25: mol_type = unassigned RNA
ttcccgcgtgcgcgctccgcacgcc

SEQ ID NO: 5330 - RNA, 25 nt, Homo sapiens
  source 1..25: mol_type = unassigned RNA
ctcggccctcgcccgcctccagcgc

SEQ ID NO: 5331 - RNA, 25 nt, Homo sapiens
  source 1..25: mol_type = unassigned RNA
cctcggccctcgcccgcctccagcg

SEQ ID NO: 5332 - RNA, 25 nt, Homo sapiens
  source 1..25: mol_type = unassigned RNA
caagccgcgctccctagctgcccct

SEQ ID NO: 5333 - RNA, 25 nt, Homo sapiens
  source 1..25: mol_type = unassigned RNA
tgaggacactggcgggcctgcgggg

SEQ ID NO: 5334 - RNA, 25 nt, Homo sapiens
  source 1..25: mol_type = unassigned RNA
agctgaggacactggcgggcctgcg

SEQ ID NO: 5335 - RNA, 25 nt, Homo sapiens
  source 1..25: mol_type = unassigned RNA
cagctgaggacactggcgggcctgc

SEQ ID NO: 5336 - RNA, 25 nt, Homo sapiens
  source 1..25: mol_type = unassigned RNA
gcagctgaggacactggcgggcctg

SEQ ID NO: 5337 - RNA, 25 nt, Homo sapiens
  source 1..25: mol_type = unassigned RNA
cgcggaggcagctgaggacactggc

SEQ ID NO: 5338 - RNA, 25 nt, Homo sapiens
  source 1..25: mol_type = unassigned RNA
gcgcggaggcagctgaggacactgg

SEQ ID NO: 5339 - RNA, 25 nt, Homo sapiens
  source 1..25: mol_type = unassigned RNA
ggcgcgcggaggcagctgaggacac

SEQ ID NO: 5340 - RNA, 25 nt, Homo sapiens
  source 1..25: mol_type = unassigned RNA
tgactttggcgcgcggaggcagctg

SEQ ID NO: 5341 - RNA, 25 nt, Homo sapiens
  source 1..25: mol_type = unassigned RNA
gtcggggtttgactttggcgcgcgg

SEQ ID NO: 5342 - RNA, 25 nt, Homo sapiens
  source 1..25: mol_type = unassigned RNA
ggtgtcggggtttgactttggcgcg

SEQ ID NO: 5343 - RNA, 25 nt, Homo sapiens
  source 1..25: mol_type = unassigned RNA
gccggcgggtgtcggggtttgactt

SEQ ID NO: 5344 - RNA, 25 nt, Homo sapiens
  source 1..25: mol_type = unassigned RNA
ctcaccggcccgccggcgggtgtcg

SEQ ID NO: 5345 - RNA, 25 nt, Homo sapiens
  source 1..25: mol_type = unassigned RNA
gctcaccggcccgccggcgggtgtc

SEQ ID NO: 5346 - RNA, 25 nt, Homo sapiens
  source 1..25: mol_type = unassigned RNA
agctcaccggcccgccggcgggtgt

SEQ ID NO: 5347 - RNA, 25 nt, Homo sapiens
  source 1..25: mol_type = unassigned RNA
ctagtgagctcaccggcccgccggc

SEQ ID NO: 5348 - RNA, 25 nt, Homo sapiens
  source 1..25: mol_type = unassigned RNA
gctagtgagctcaccggcccgccgg

SEQ ID NO: 5349 - RNA, 25 nt, Homo sapiens
  source 1..25: mol_type = unassigned RNA
tcagctagtgagctcaccggcccgc

SEQ ID NO: 5350 - RNA, 25 nt, Homo sapiens
  source 1..25: mol_type = unassigned RNA
ctgccgggtcagctagtgagctcac

SEQ ID NO: 5351 - RNA, 25 nt, Homo sapiens
  source 1..25: mol_type = unassigned RNA
ccgctaagccagatcctgacctgcc

SEQ ID NO: 5352 - RNA, 25 nt, Homo sapiens
  source 1..25: mol_type = unassigned RNA
gccgctaagccagatcctgacctgc

SEQ ID NO: 5353 - RNA, 25 nt, Homo sapiens
  source 1..25: mol_type = unassigned RNA
ccacgggtgcgcgcactggagctcg

SEQ ID NO: 5354 - RNA, 25 nt, Homo sapiens
  source 1..25: mol_type = unassigned RNA
gggaggcggccacgggtgcgcgcac

SEQ ID NO: 5355 - RNA, 25 nt, Homo sapiens
  source 1..25: mol_type = unassigned RNA
gcaaagagggctgggaggcggccac

SEQ ID NO: 5356 - RNA, 25 nt, Homo sapiens
  source 1..25: mol_type = unassigned RNA
ggcaaagagggctgggaggcggcca

SEQ ID NO: 5357 - RNA, 25 nt, Homo sapiens
  source 1..25: mol_type = unassigned RNA
tcgtccggcaaagagggctgggagg

SEQ ID NO: 5358 - RNA, 25 nt, Homo sapiens
  source 1..25: mol_type = unassigned RNA
agctcgtccggcaaagagggctggg

SEQ ID NO: 5359 - RNA, 25 nt, Homo sapiens
  source 1..25: mol_type = unassigned RNA
cagagctcgtccggcaaagagggct

SEQ ID NO: 5360 - RNA, 25 nt, Homo sapiens
  source 1..25: mol_type = unassigned RNA
ccagagctcgtccggcaaagagggc

SEQ ID NO: 5361 - RNA, 25 nt, Homo sapiens
  source 1..25: mol_type = unassigned RNA
cggcccagagctcgtccggcaaaga

SEQ ID NO: 5362 - RNA, 25 nt, Homo sapiens
  source 1..25: mol_type = unassigned RNA
gcggcccagagctcgtccggcaaag

SEQ ID NO: 5363 - RNA, 25 nt, Homo sapiens
  source 1..25: mol_type = unassigned RNA
gtcttgtggcggcccagagctcgtc

SEQ ID NO: 5364 - RNA, 25 nt, Homo sapiens
  source 1..25: mol_type = unassigned RNA
gggtggccattccttagtcttgtgg

SEQ ID NO: 5365 - RNA, 25 nt, Homo sapiens
  source 1..25: mol_type = unassigned RNA
gcggggtggccattccttagtcttg

SEQ ID NO: 5366 - RNA, 25 nt, Homo sapiens
  source 1..25: mol_type = unassigned RNA
gacgggcagcttctcttgggcgggg

SEQ ID NO: 5367 - RNA, 25 nt, Homo sapiens
  source 1..25: mol_type = unassigned RNA
aaagacgggcagcttctcttgggcg

SEQ ID NO: 5368 - RNA, 25 nt, Homo sapiens
  source 1..25: mol_type = unassigned RNA
gaaagacgggcagcttctcttgggc

SEQ ID NO: 5369 - RNA, 25 nt, Homo sapiens
  source 1..25: mol_type = unassigned RNA
agaaagacgggcagcttctcttggg

SEQ ID NO: 5370 - RNA, 25 nt, Homo sapiens
  source 1..25: mol_type = unassigned RNA
ctgagaaagacgggcagcttctctt

SEQ ID NO: 5371 - RNA, 25 nt, Homo sapiens
  source 1..25: mol_type = unassigned RNA
gctgagaaagacgggcagcttctct

SEQ ID NO: 5372 - RNA, 25 nt, Homo sapiens
  source 1..25: mol_type = unassigned RNA
cccctcagagctggctgagaaagac

SEQ ID NO: 5373 - RNA, 25 nt, Homo sapiens
  source 1..25: mol_type = unassigned RNA
tcccctcagagctggctgagaaaga

SEQ ID NO: 5374 - RNA, 25 nt, Homo sapiens
  source 1..25: mol_type = unassigned RNA
ttcttgatgcgggtcccctcagagc

SEQ ID NO: 5375 - RNA, 25 nt, Homo sapiens
  source 1..25: mol_type = unassigned RNA
ccttcgatggagattttcttgatgc

SEQ ID NO: 5376 - RNA, 25 nt, Homo sapiens
  source 1..25: mol_type = unassigned RNA
cccttcgatggagattttcttgatg

SEQ ID NO: 5377 - RNA, 25 nt, Homo sapiens
  source 1..25: mol_type = unassigned RNA
ggctccttaccgatgttcccttcga

SEQ ID NO: 5378 - RNA, 25 nt, Homo sapiens
  source 1..25: mol_type = unassigned RNA
ttttatctttcctcacaacagctgc

SEQ ID NO: 5379 - RNA, 25 nt, Homo sapiens
  source 1..25: mol_type = unassigned RNA
tttatctttcctcacaacagctgca

SEQ ID NO: 5380 - RNA, 25 nt, Homo sapiens
  source 1..25: mol_type = unassigned RNA
tatccttaaacaattgtgtgaagat

SEQ ID NO: 5381 - RNA, 25 nt, Homo sapiens
  source 1..25: mol_type = unassigned RNA
atccttaaacaattgtgtgaagatt

SEQ ID NO: 5382 - RNA, 25 nt, Homo sapiens
  source 1..25: mol_type = unassigned RNA
aaacaattgtgtgaagattgggaag

SEQ ID NO: 5383 - RNA, 25 nt, Homo sapiens
  source 1..25: mol_type = unassigned RNA
agtggttcctgaacctgttgccaga

SEQ ID NO: 5384 - RNA, 25 nt, Homo sapiens
  source 1..25: mol_type = unassigned RNA
gttcaaagtactcaagatgaatttg

SEQ ID NO: 5385 - RNA, 25 nt, Homo sapiens
  source 1..25: mol_type = unassigned RNA
tgttgacttccctgcagctgttgtg

SEQ ID NO: 5386 - RNA, 25 nt, Homo sapiens
  source 1..25: mol_type = unassigned RNA
ttcccaatcttcacacaattgttta

SEQ ID NO: 5387 - RNA, 25 nt, Homo sapiens
  source 1..25: mol_type = unassigned RNA
cattgcaccatctggcaacaggttc

SEQ ID NO: 5388 - RNA, 25 nt, Homo sapiens
  source 1..25: mol_type = unassigned RNA
tttgaacattgcaccatctggcaac

SEQ ID NO: 5389 - RNA, 25 nt, Homo sapiens
  source 1..25: mol_type = unassigned RNA
tgagtactttgaacattgcaccatc

SEQ ID NO: 5390 - RNA, 25 nt, Homo sapiens
  source 1..25: mol_type = unassigned RNA
aggaacttacaatgtctcagaaaaa

SEQ ID NO: 5391 - RNA, 25 nt, Homo sapiens
  source 1..25: mol_type = unassigned RNA
aacttacaatgtctcagaaaaatgg

SEQ ID NO: 5392 - RNA, 25 nt, Homo sapiens
  source 1..25: mol_type = unassigned RNA
acttacaatgtctcagaaaaatggt

SEQ ID NO: 5393 - RNA, 25 nt, Homo sapiens
  source 1..25: mol_type = unassigned RNA
gatgatgtatgagaaacctgaacga

SEQ ID NO: 5394 - RNA, 25 nt, Homo sapiens
  source 1..25: mol_type = unassigned RNA
taagagctcagcttgcctctctgaa

SEQ ID NO: 5395 - RNA, 25 nt, Homo sapiens
  source 1..25: mol_type = unassigned RNA
ttttgaacgatctgtgtatagtgac

SEQ ID NO: 5396 - RNA, 25 nt, Homo sapiens
  source 1..25: mol_type = unassigned RNA
gtgtatagtgacaggtatgtataaa

SEQ ID NO: 5397 - RNA, 25 nt, Homo sapiens
  source 1..25: mol_type = unassigned RNA
caggtatgtataaatggcttgtacg

SEQ ID NO: 5398 - RNA, 25 nt, Homo sapiens
  source 1..25: mol_type = unassigned RNA
tttggaaggtaaaagaccatcgttc

SEQ ID NO: 5399 - RNA, 25 nt, Homo sapiens
  source 1..25: mol_type = unassigned RNA
cgactgagacaggcatatgtttgga

SEQ ID NO: 5400 - RNA, 25 nt, Homo sapiens
  source 1..25: mol_type = unassigned RNA
tattcgactgagacaggcatatgtt

SEQ ID NO: 5401 - RNA, 25 nt, Homo sapiens
  source 1..25: mol_type = unassigned RNA
agctgagctcttattcgactgagac

SEQ ID NO: 5402 - RNA, 25 nt, Homo sapiens
  source 1..25: mol_type = unassigned RNA
gcatctttgagcttgccattcagag

SEQ ID NO: 5403 - RNA, 25 nt, Homo sapiens
  source 1..25: mol_type = unassigned RNA
acacagatcgttcaaaaaataatac

SEQ ID NO: 5404 - RNA, 25 nt, Homo sapiens
  source 1..25: mol_type = unassigned RNA
atctgaatgcatgaatgagacagag

SEQ ID NO: 5405 - RNA, 25 nt, Homo sapiens
  source 1..25: mol_type = unassigned RNA
gacagagtggacaatttatcaagac

SEQ ID NO: 5406 - RNA, 25 nt, Homo sapiens
  source 1..25: mol_type = unassigned RNA
gacaatttatcaagactggcatgac

SEQ ID NO: 5407 - RNA, 25 nt, Homo sapiens
  source 1..25: mol_type = unassigned RNA
ggcatgactggatgaataaccaatt

SEQ ID NO: 5408 - RNA, 25 nt, Homo sapiens
  source 1..25: mol_type = unassigned RNA
aaccaatttggccaaagccttgaat

SEQ ID NO: 5409 - RNA, 25 nt, Homo sapiens
  source 1..25: mol_type = unassigned RNA
aatttggccaaagccttgaattgga

SEQ ID NO: 5410 - RNA, 25 nt, Homo sapiens
  source 1..25: mol_type = unassigned RNA
atcatttatcttcaagccactccag

SEQ ID NO: 5411 - RNA, 25 nt, Homo sapiens
  source 1..25: mol_type = unassigned RNA
atccaattcaaggctttggccaaat

SEQ ID NO: 5412 - RNA, 25 nt, Homo sapiens
  source 1..25: mol_type = unassigned RNA
aatgattccatccaattcaaggctt

SEQ ID NO: 5413 - RNA, 25 nt, Homo sapiens
  source 1..25: mol_type = unassigned RNA
aagataaatgattccatccaattca

SEQ ID NO: 5414 - RNA, 25 nt, Homo sapiens
  source 1..25: mol_type = unassigned RNA
tttttattgggttttacctctggag

SEQ ID NO: 5415 - RNA, 25 nt, Homo sapiens
  source 1..25: mol_type = unassigned RNA
acacatttttattgggttttacctc

SEQ ID NO: 5416 - RNA, 25 nt, Homo sapiens
  source 1..25: mol_type = unassigned RNA
gacatgcttacatagaatatattta

SEQ ID NO: 5417 - RNA, 25 nt, Homo sapiens
  source 1..25: mol_type = unassigned RNA
acatgcttacatagaatatatttac

SEQ ID NO: 5418 - RNA, 25 nt, Homo sapiens
  source 1..25: mol_type = unassigned RNA
catgcttacatagaatatatttacg

SEQ ID NO: 5419 - RNA, 25 nt, Homo sapiens
  source 1..25: mol_type = unassigned RNA
atttacggggaagaaatgaagagca

SEQ ID NO: 5420 - RNA, 25 nt, Homo sapiens
  source 1..25: mol_type = unassigned RNA
gaagcttcattataaacatgaaagc

SEQ ID NO: 5421 - RNA, 25 nt, Homo sapiens
  source 1..25: mol_type = unassigned RNA
taaacatgaaagctggctcctgcat

SEQ ID NO: 5422 - RNA, 25 nt, Homo sapiens
  source 1..25: mol_type = unassigned RNA
atgtctaaaagcaagtaataagaga

SEQ ID NO: 5423 - RNA, 25 nt, Homo sapiens
  source 1..25: mol_type = unassigned RNA
aatgaagcttctctaaatattcaag

SEQ ID NO: 5424 - RNA, 25 nt, Homo sapiens
  source 1..25: mol_type = unassigned RNA
taagtcttacttcagtgtcctatgc

SEQ ID NO: 5425 - RNA, 25 nt, Homo sapiens
  source 1..25: mol_type = unassigned RNA
agaaccaacttcgattatcttcaag

SEQ ID NO: 5426 - RNA, 25 nt, Homo sapiens
  source 1..25: mol_type = unassigned RNA
cttcaagaggtgcctatcttaacac

SEQ ID NO: 5427 - RNA, 25 nt, Homo sapiens
  source 1..25: mol_type = unassigned RNA
gactttaaagacaaatatgaaagtc

SEQ ID NO: 5428 - RNA, 25 nt, Homo sapiens
  source 1..25: mol_type = unassigned RNA
gacaaatatgaaagtctggttgaaa

SEQ ID NO: 5429 - RNA, 25 nt, Homo sapiens
  source 1..25: mol_type = unassigned RNA
ggcacctcttgaagataatcgaagt

SEQ ID NO: 5430 - RNA, 25 nt, Homo sapiens
  source 1..25: mol_type = unassigned RNA
cttcattaacatccagtgttaagat

SEQ ID NO: 5431 - RNA, 25 nt, Homo sapiens
  source 1..25: mol_type = unassigned RNA
actttgtgatcttgctgaagactac

SEQ ID NO: 5432 - RNA, 25 nt, Homo sapiens
  source 1..25: mol_type = unassigned RNA
ttgctgaagactacaggcagccaaa

SEQ ID NO: 5433 - RNA, 25 nt, Homo sapiens
  source 1..25: mol_type = unassigned RNA
caagtttttaatcgtttttgtttta

SEQ ID NO: 5434 - RNA, 25 nt, Homo sapiens
  source 1..25: mol_type = unassigned RNA
tcctcagcaggttggcttttttccc

SEQ ID NO: 5435 - RNA, 25 nt, Homo sapiens
  source 1..25: mol_type = unassigned RNA
ttttccctggtgcctctcacttcgt

SEQ ID NO: 5436 - RNA, 25 nt, Homo sapiens
  source 1..25: mol_type = unassigned RNA
gaaagctttaatgttacatagtaaa

SEQ ID NO: 5437 - RNA, 25 nt, Homo sapiens
  source 1..25: mol_type = unassigned RNA
agtgtacctattaaaagttgcaaag

SEQ ID NO: 5438 - RNA, 25 nt, Homo sapiens
  source 1..25: mol_type = unassigned RNA
attaaaagttgcaaagtggaattaa

SEQ ID NO: 5439 - RNA, 25 nt, Homo sapiens
  source 1..25: mol_type = unassigned RNA
tggaattaaaggaatccctagaata

SEQ ID NO: 5440 - RNA, 25 nt, Homo sapiens
  source 1..25: mol_type = unassigned RNA
gcctcagtctgctttctctactgtc

SEQ ID NO: 5441 - RNA, 25 nt, Homo sapiens
  source 1..25: mol_type = unassigned RNA
gctttctctactgtctggattaatt

SEQ ID NO: 5442 - RNA, 25 nt, Homo sapiens
  source 1..25: mol_type = unassigned RNA
ctgaaagcattattttttgttgaat

SEQ ID NO: 5443 - RNA, 25 nt, Homo sapiens
  source 1..25: mol_type = unassigned RNA
taggaaataaaattaatgaagacag

SEQ ID NO: 5444 - RNA, 25 nt, Homo sapiens
  source 1..25: mol_type = unassigned RNA
tgtgaatatttgtaaaaataatgaa

SEQ ID NO: 5445 - RNA, 25 nt, Homo sapiens
  source 1..25: mol_type = unassigned RNA
attttctttctagtttgtttagtta

SEQ ID NO: 5446 - RNA, 25 nt, Homo sapiens
  source 1..25: mol_type = unassigned RNA
agaaaattttatgtattttaaaata

SEQ ID NO: 5447 - RNA, 25 nt, Homo sapiens
  source 1..25: mol_type = unassigned RNA
gaaaattttatgtattttaaaataa

SEQ ID NO: 5448 - RNA, 25 nt, Homo sapiens
  source 1..25: mol_type = unassigned RNA
aaaattttatgtattttaaaataag

SEQ ID NO: 5449 - RNA, 25 nt, Homo sapiens
  source 1..25: mol_type = unassigned RNA
tttctttccaagtcatttttgtttt

SEQ ID NO: 5450 - RNA, 25 nt, Homo sapiens
  source 1..25: mol_type = unassigned RNA
ttcttattcaaagatgataatttag

SEQ ID NO: 5451 - RNA, 25 nt, Homo sapiens
  source 1..25: mol_type = unassigned RNA
agtccagacgcactgatctttgcaa

SEQ ID NO: 5452 - RNA, 25 nt, Homo sapiens
  source 1..25: mol_type = unassigned RNA
tgcatttttttagtttgtttttgtt

SEQ ID NO: 5453 - RNA, 25 nt, Homo sapiens
  source 1..25: mol_type = unassigned RNA
taagtataaaccttatgaactacag

SEQ ID NO: 5454 - RNA, 25 nt, Homo sapiens
  source 1..25: mol_type = unassigned RNA
cttttaaataaattatgaatattaa

SEQ ID NO: 5455 - RNA, 25 nt, Homo sapiens
  source 1..25: mol_type = unassigned RNA
taaattactttgattccattttaag

SEQ ID NO: 5456 - RNA, 25 nt, Homo sapiens
  source 1..25: mol_type = unassigned RNA
tcatgactcaaaagttgtctcagtg

SEQ ID NO: 5457 - RNA, 25 nt, Homo sapiens
  source 1..25: mol_type = unassigned RNA
tgactcaaaagttgtctcagtgtgg

SEQ ID NO: 5458 - RNA, 25 nt, Homo sapiens
  source 1..25: mol_type = unassigned RNA
ctcaaaaactctttgacctgaggaa

SEQ ID NO: 5459 - RNA, 25 nt, Homo sapiens
  source 1..25: mol_type = unassigned RNA
aagtactcaaaaactctttgacctg

SEQ ID NO: 5460 - RNA, 25 nt, Homo sapiens
  source 1..25: mol_type = unassigned RNA
caaagctgaagtatctggaaccatt

SEQ ID NO: 5461 - RNA, 25 nt, Homo sapiens
  source 1..25: mol_type = unassigned RNA
cgaagatacacaaagctgaagtatc

SEQ ID NO: 5462 - RNA, 25 nt, Homo sapiens
  source 1..25: mol_type = unassigned RNA
ttaaaacaaaaacgattaaaaactt

SEQ ID NO: 5463 - RNA, 25 nt, Homo sapiens
  source 1..25: mol_type = unassigned RNA
cttaaaacaaaaacgattaaaaact

SEQ ID NO: 5464 - RNA, 25 nt, Homo sapiens
  source 1..25: mol_type = unassigned RNA
ttttttttttgttttcttttctttc

SEQ ID NO: 5465 - RNA, 25 nt, Homo sapiens
  source 1..25: mol_type = unassigned RNA
gtcaccaacgaagtgagaggcacca

SEQ ID NO: 5466 - RNA, 25 nt, Homo sapiens
  source 1..25: mol_type = unassigned RNA
ggtcaccaacgaagtgagaggcacc

SEQ ID NO: 5467 - RNA, 25 nt, Homo sapiens
  source 1..25: mol_type = unassigned RNA
agaaactggtcaccaacgaagtgag

SEQ ID NO: 5468 - RNA, 25 nt, Homo sapiens
  source 1..25: mol_type = unassigned RNA
cattaaagctttcagtttaagaaac

SEQ ID NO: 5469 - RNA, 25 nt, Homo sapiens
  source 1..25: mol_type = unassigned RNA
ttttaataggtacactaatttacac

SEQ ID NO: 5470 - RNA, 25 nt, Homo sapiens
  source 1..25: mol_type = unassigned RNA
ttaattccactttgcaacttttaat

SEQ ID NO: 5471 - RNA, 25 nt, Homo sapiens
  source 1..25: mol_type = unassigned RNA
ataaaacttcagaatccttattcta

SEQ ID NO: 5472 - RNA, 25 nt, Homo sapiens
  source 1..25: mol_type = unassigned RNA
aataaaacttcagaatccttattct

SEQ ID NO: 5473 - RNA, 25 nt, Homo sapiens
  source 1..25: mol_type = unassigned RNA
cagactgaggcaggaagtaagaggt

SEQ ID NO: 5474 - RNA, 25 nt, Homo sapiens
  source 1..25: mol_type = unassigned RNA
gcagactgaggcaggaagtaagagg

SEQ ID NO: 5475 - RNA, 25 nt, Homo sapiens
  source 1..25: mol_type = unassigned RNA
aaagcagactgaggcaggaagtaag

SEQ ID NO: 5476 - RNA, 25 nt, Homo sapiens
  source 1..25: mol_type = unassigned RNA
gacagtagagaaagcagactgaggc

SEQ ID NO: 5477 - RNA, 25 nt, Homo sapiens
  source 1..25: mol_type = unassigned RNA
tccagacagtagagaaagcagactg

SEQ ID NO: 5478 - RNA, 25 nt, Homo sapiens
  source 1..25: mol_type = unassigned RNA
aaatgtgtgactttaactttatagc

SEQ ID NO: 5479 - RNA, 25 nt, Homo sapiens
  source 1..25: mol_type = unassigned RNA
ctattcaacaaaaaataatgctttc

SEQ ID NO: 5480 - RNA, 25 nt, Homo sapiens
  source 1..25: mol_type = unassigned RNA
tagttaagtgtgtctcattaattaa

SEQ ID NO: 5481 - RNA, 25 nt, Homo sapiens
  source 1..25: mol_type = unassigned RNA
ttatttttacaaatattcacataga

SEQ ID NO: 5482 - RNA, 25 nt, Homo sapiens
  source 1..25: mol_type = unassigned RNA
cgtaaaatggaaaggtttaatacac

SEQ ID NO: 5483 - RNA, 25 nt, Homo sapiens
  source 1..25: mol_type = unassigned RNA
aaattttctaaaacgtaaaatggaa

SEQ ID NO: 5484 - RNA, 25 nt, Homo sapiens
  source 1..25: mol_type = unassigned RNA
acataaaattttctaaaacgtaaaa

SEQ ID NO: 5485 - RNA, 25 nt, Homo sapiens
  source 1..25: mol_type = unassigned RNA
taagaaaccaaaaacaaaaatgact

SEQ ID NO: 5486 - RNA, 25 nt, Homo sapiens
  source 1..25: mol_type = unassigned RNA
tttgcaaagatcagtgcgtctggac

SEQ ID NO: 5487 - RNA, 25 nt, Homo sapiens
  source 1..25: mol_type = unassigned RNA
tctcctttgcaaagatcagtgcgtc

SEQ ID NO: 5488 - RNA, 25 nt, Homo sapiens
  source 1..25: mol_type = unassigned RNA
tacgtataatgagacagtttatgta

SEQ ID NO: 5489 - RNA, 25 nt, Homo sapiens
  source 1..25: mol_type = unassigned RNA
gagtgtagctccactgtagttcata

SEQ ID NO: 5490 - RNA, 25 nt, Homo sapiens
  source 1..25: mol_type = unassigned RNA
cactgaaatatgtctccacttaaaa

SEQ ID NO: 5491 - RNA, 25 nt, Homo sapiens
  source 1..25: mol_type = unassigned RNA
tttaaaagtcattatacatttttaa

SEQ ID NO: 5492 - RNA, 20 nt, Homo sapiens
  source 1..20: mol_type = unassigned RNA
cacgcgtttaatataagtgg

SEQ ID NO: 5493 - RNA, 20 nt, Homo sapiens
  source 1..20: mol_type = unassigned RNA
tataagtggaggcgtcgcgc

SEQ ID NO: 5494 - RNA, 20 nt, Homo sapiens
  source 1..20: mol_type = unassigned RNA
aagtggaggcgtcgcgctgg

SEQ ID NO: 5495 - RNA, 20 nt, Homo sapiens
  source 1..20: mol_type = unassigned RNA
ggccgagatgtctcgctccg

SEQ ID NO: 5496 - RNA, 20 nt, Homo sapiens
  source 1..20: mol_type = unassigned RNA
ggccacggagcgagacatct

SEQ ID NO: 5497 - RNA, 20 nt, Homo sapiens
  source 1..20: mol_type = unassigned RNA
cgcgagcacagctaaggcca

SEQ ID NO: 5498 - RNA, 20 nt, Homo sapiens
  source 1..20: mol_type = unassigned RNA
gagtagcgcgagcacagcta

SEQ ID NO: 5499 - RNA, 20 nt, Homo sapiens
  source 1..20: mol_type = unassigned RNA
actcacgctggatagcctcc

SEQ ID NO: 5500 - RNA, 20 nt, Homo sapiens
  source 1..20: mol_type = unassigned RNA
agggtaggagagactcacgc

SEQ ID NO: 5501 - RNA, 20 nt, Homo sapiens
  source 1..20: mol_type = unassigned RNA
ctcaggtactccaaagattc

SEQ ID NO: 5502 - RNA, 20 nt, Homo sapiens
  source 1..20: mol_type = unassigned RNA
cgtgagtaaacctgaatctt

SEQ ID NO: 5503 - RNA, 20 nt, Homo sapiens
  source 1..20: mol_type = unassigned RNA
cagtaagtcaacttcaatgt

SEQ ID NO: 5504 - RNA, 20 nt, Homo sapiens
  source 1..20: mol_type = unassigned RNA
acttgtctttcagcaaggac

SEQ ID NO: 5505 - RNA, 20 nt, Homo sapiens
  source 1..20: mol_type = unassigned RNA
agtcacatggttcacacggc

SEQ ID NO: 5506 - RNA, 20 nt, Homo sapiens
  source 1..20: mol_type = unassigned RNA
acaaagtcacatggttcaca

SEQ ID NO: 5507 - RNA, 20 nt, Homo sapiens
  source 1..20: mol_type = unassigned RNA
cacagcccaagatagttaag

SEQ ID NO: 5508 - RNA, 20 nt, Homo sapiens
  source 1..20: mol_type = unassigned RNA
acagcccaagatagttaagt

SEQ ID NO: 5509 - RNA, 20 nt, Homo sapiens
  source 1..20: mol_type = unassigned RNA
ttaccccacttaactatctt

SEQ ID NO: 5510 - RNA, 20 nt, Homo sapiens
  source 1..20: mol_type = unassigned RNA
cttaccccacttaactatct

SEQ ID NO: 5511 - RNA, 20 nt, Homo sapiens
  source 1..20: mol_type = unassigned RNA
aggtttgaagatgccgcatt

SEQ ID NO: 5512 - RNA, 20 nt, Homo sapiens
  source 1..20: mol_type = unassigned RNA
tgaagatgccgcatttggat

SEQ ID NO: 5513 - RNA, 20 nt, Homo sapiens
  source 1..20: mol_type = unassigned RNA
gaattcatccaatccaaatg

SEQ ID NO: 5514 - RNA, 20 nt, Homo sapiens
  source 1..20: mol_type = unassigned RNA
acactttatgcacaaaatgt

SEQ ID NO: 5515 - RNA, 20 nt, Homo sapiens
  source 1..20: mol_type = unassigned RNA
ctgctcagatacatcaaaca

SEQ ID NO: 5516 - RNA, 20 nt, Homo sapiens
  source 1..20: mol_type = unassigned RNA
catgtttgatgtatctgagc

SEQ ID NO: 5517 - RNA, 20 nt, Homo sapiens
  source 1..20: mol_type = unassigned RNA
atctgagcaggttgctccac

SEQ ID NO: 5518 - RNA, 20 nt, Homo sapiens
  source 1..20: mol_type = unassigned RNA
gctccacaggtagctctagg

SEQ ID NO: 5519 - RNA, 20 nt, Homo sapiens
  source 1..20: mol_type = unassigned RNA
taggagggctggcaacttag

SEQ ID NO: 5520 - RNA, 20 nt, Homo sapiens
  source 1..20: mol_type = unassigned RNA
gagggctggcaacttagagg

SEQ ID NO: 5521 - RNA, 20 nt, Homo sapiens
  source 1..20: mol_type = unassigned RNA
agggctggcaacttagaggt

SEQ ID NO: 5522 - RNA, 20 nt, Homo sapiens
  source 1..20: mol_type = unassigned RNA
gggctggcaacttagaggtg

SEQ ID NO: 5523 - RNA, 20 nt, Homo sapiens
  source 1..20: mol_type = unassigned RNA
tctgaccaagatgttgatgt

SEQ ID NO: 5524 - RNA, 20 nt, Homo sapiens
  source 1..20: mol_type = unassigned RNA
tctaagcagagtatgtaaat

SEQ ID NO: 5525 - RNA, 20 nt, Homo sapiens
  source 1..20: mol_type = unassigned RNA
aatataattgacaggattat

SEQ ID NO: 5526 - RNA, 20 nt, Homo sapiens
  source 1..20: mol_type = unassigned RNA
cttatacatttgataaagta

SEQ ID NO: 5527 - RNA, 20 nt, Homo sapiens
  source 1..20: mol_type = unassigned RNA
aggcatggttgtggttaatc

SEQ ID NO: 5528 - RNA, 20 nt, Homo sapiens
  source 1..20: mol_type = unassigned RNA
ctcaaggttcagatcagaag

SEQ ID NO: 5529 - RNA, 20 nt, Homo sapiens
  source 1..20: mol_type = unassigned RNA
aaggttcagatcagaagagg

SEQ ID NO: 5530 - RNA, 20 nt, Homo sapiens
  source 1..20: mol_type = unassigned RNA
gaggcttctcaccctgcagc

SEQ ID NO: 5531 - RNA, 20 nt, Homo sapiens
  source 1..20: mol_type = unassigned RNA
aggcttctcaccctgcagca

SEQ ID NO: 5532 - RNA, 20 nt, Homo sapiens
  source 1..20: mol_type = unassigned RNA
gctcacaggtccctgctgca

SEQ ID NO: 5533 - RNA, 20 nt, Homo sapiens
  source 1..20: mol_type = unassigned RNA
tgctcacaggtccctgctgc

SEQ ID NO: 5534 - RNA, 20 nt, Homo sapiens
  source 1..20: mol_type = unassigned RNA
gcagcagggacctgtgagca

SEQ ID NO: 5535 - RNA, 20 nt, Homo sapiens
  source 1..20: mol_type = unassigned RNA
cctgtgagcatggcatgccc

SEQ ID NO: 5536 - RNA, 20 nt, Homo sapiens
  source 1..20: mol_type = unassigned RNA
ccagggcatgccatgctcac

SEQ ID NO: 5537 - RNA, 20 nt, Homo sapiens
  source 1..20: mol_type = unassigned RNA
caagtgcccacaggaagcca

SEQ ID NO: 5538 - RNA, 20 nt, Homo sapiens
  source 1..20: mol_type = unassigned RNA
acaagtgcccacaggaagcc

SEQ ID NO: 5539 - RNA, 20 nt, Homo sapiens
  source 1..20: mol_type = unassigned RNA
tggagatcacaagtgcccac

SEQ ID NO: 5540 - RNA, 20 nt, Homo sapiens
  source 1..20: mol_type = unassigned RNA
gccttccttaccaagacagg

SEQ ID NO: 5541 - RNA, 20 nt, Homo sapiens
  source 1..20: mol_type = unassigned RNA
tgcgccttccttaccaagac

SEQ ID NO: 5542 - RNA, 20 nt, Homo sapiens
  source 1..20: mol_type = unassigned RNA
ctttcccacagaatttagca

SEQ ID NO: 5543 - RNA, 20 nt, Homo sapiens
  source 1..20: mol_type = unassigned RNA
accagagatgtctgtgcagg

SEQ ID NO: 5544 - RNA, 20 nt, Homo sapiens
  source 1..20: mol_type = unassigned RNA
gcctcctgcacagacatctc

SEQ ID NO: 5545 - RNA, 20 nt, Homo sapiens
  source 1..20: mol_type = unassigned RNA
atatgtgcagctcagggtca

SEQ ID NO: 5546 - RNA, 20 nt, Homo sapiens
  source 1..20: mol_type = unassigned RNA
ggtgtcatatgtgcagctca

SEQ ID NO: 5547 - RNA, 20 nt, Homo sapiens
  source 1..20: mol_type = unassigned RNA
tggtgtcatatgtgcagctc

SEQ ID NO: 5548 - RNA, 20 nt, Homo sapiens
  source 1..20: mol_type = unassigned RNA
taaataataatcactctcac

SEQ ID NO: 5549 - RNA, 20 nt, Homo sapiens
  source 1..20: mol_type = unassigned RNA
agagtgattattatttattc

SEQ ID NO: 5550 - RNA, 20 nt, Homo sapiens
  source 1..20: mol_type = unassigned RNA
ggtacaagcagcctcccagc

SEQ ID NO: 5551 - RNA, 20 nt, Homo sapiens
  source 1..20: mol_type = unassigned RNA
agaatcatctgcctgctggg

SEQ ID NO: 5552 - RNA, 20 nt, Homo sapiens
  source 1..20: mol_type = unassigned RNA
acgagaatcatctgcctgct

SEQ ID NO: 5553 - RNA, 20 nt, Homo sapiens
  source 1..20: mol_type = unassigned RNA
aacgagaatcatctgcctgc

SEQ ID NO: 5554 - RNA, 20 nt, Homo sapiens
  source 1..20: mol_type = unassigned RNA
tctgttgcttataagcttct

SEQ ID NO: 5555 - RNA, 20 nt, Homo sapiens
  source 1..20: mol_type = unassigned RNA
gttggtgaggttgataaatt

SEQ ID NO: 5556 - RNA, 20 nt, Homo sapiens
  source 1..20: mol_type = unassigned RNA
gctgtatgtgtgagttggtg

SEQ ID NO: 5557 - RNA, 20 nt, Homo sapiens
  source 1..20: mol_type = unassigned RNA
accaactcacacatacagcc

SEQ ID NO: 5558 - RNA, 20 nt, Homo sapiens
  source 1..20: mol_type = unassigned RNA
ccaactcacacatacagcca

SEQ ID NO: 5559 - RNA, 20 nt, Homo sapiens
  source 1..20: mol_type = unassigned RNA
agcacaagaatatagatccc

SEQ ID NO: 5560 - RNA, 20 nt, Homo sapiens
  source 1..20: mol_type = unassigned RNA
tattcttgtgctctcagaga

SEQ ID NO: 5561 - RNA, 20 nt, Homo sapiens
  source 1..20: mol_type = unassigned RNA
ggaaacacacctcttgtctt

SEQ ID NO: 5562 - RNA, 20 nt, Homo sapiens
  source 1..20: mol_type = unassigned RNA
cacacctcttgtctttggaa

SEQ ID NO: 5563 - RNA, 20 nt, Homo sapiens
  source 1..20: mol_type = unassigned RNA
acacctcttgtctttggaaa

SEQ ID NO: 5564 - RNA, 20 nt, Homo sapiens
  source 1..20: mol_type = unassigned RNA
gtgccctttccaaagacaag

SEQ ID NO: 5565 - RNA, 20 nt, Homo sapiens
  source 1..20: mol_type = unassigned RNA
acacggcagggtcagggttc

SEQ ID NO: 5566 - RNA, 20 nt, Homo sapiens
  source 1..20: mol_type = unassigned RNA
agctggtacacggcagggtc

SEQ ID NO: 5567 - RNA, 20 nt, Homo sapiens
  source 1..20: mol_type = unassigned RNA
ctctcagctggtacacggca

SEQ ID NO: 5568 - RNA, 20 nt, Homo sapiens
  source 1..20: mol_type = unassigned RNA
tctctcagctggtacacggc

SEQ ID NO: 5569 - RNA, 20 nt, Homo sapiens
  source 1..20: mol_type = unassigned RNA
agagtctctcagctggtaca

SEQ ID NO: 5570 - RNA, 20 nt, Homo sapiens
  source 1..20: mol_type = unassigned RNA
tggatttagagtctctcagc

SEQ ID NO: 5571 - RNA, 20 nt, Homo sapiens
  source 1..20: mol_type = unassigned RNA
taggcagacagacttgtcac

SEQ ID NO: 5572 - RNA, 20 nt, Homo sapiens
  source 1..20: mol_type = unassigned RNA
gagaatcaaaatcggtgaat

SEQ ID NO: 5573 - RNA, 20 nt, Homo sapiens
  source 1..20: mol_type = unassigned RNA
atttgtttgagaatcaaaat

SEQ ID NO: 5574 - RNA, 20 nt, Homo sapiens
  source 1..20: mol_type = unassigned RNA
aacaaatgtgtcacaaagta

SEQ ID NO: 5575 - RNA, 20 nt, Homo sapiens
  source 1..20: mol_type = unassigned RNA
acaaaactgtgctagacatg

SEQ ID NO: 5576 - RNA, 20 nt, Homo sapiens
  source 1..20: mol_type = unassigned RNA
tgtgctagacatgaggtcta

SEQ ID NO: 5577 - RNA, 20 nt, Homo sapiens
  source 1..20: mol_type = unassigned RNA
cttcaagagcaacagtgctg

SEQ ID NO: 5578 - RNA, 20 nt, Homo sapiens
  source 1..20: mol_type = unassigned RNA
agagcaacagtgctgtggcc

SEQ ID NO: 5579 - RNA, 20 nt, Homo sapiens
  source 1..20: mol_type = unassigned RNA
aaagtcagatttgttgctcc

SEQ ID NO: 5580 - RNA, 20 nt, Homo sapiens
  source 1..20: mol_type = unassigned RNA
tggaataatgctgttgttga

SEQ ID NO: 5581 - RNA, 20 nt, Homo sapiens
  source 1..20: mol_type = unassigned RNA
ctggggaagaaggtgtcttc

SEQ ID NO: 5582 - RNA, 20 nt, Homo sapiens
  source 1..20: mol_type = unassigned RNA
agctgcccttacctgggctg

SEQ ID NO: 5583 - RNA, 20 nt, Homo sapiens
  source 1..20: mol_type = unassigned RNA
aagctgcccttacctgggct

SEQ ID NO: 5584 - RNA, 20 nt, Homo sapiens
  source 1..20: mol_type = unassigned RNA
aaagctgcccttacctgggc

SEQ ID NO: 5585 - RNA, 20 nt, Homo sapiens
  source 1..20: mol_type = unassigned RNA
caccaaagctgcccttacct

SEQ ID NO: 5586 - RNA, 20 nt, Homo sapiens
  source 1..20: mol_type = unassigned RNA
gcaccaaagctgcccttacc

SEQ ID NO: 5587 - RNA, 20 nt, Homo sapiens
  source 1..20: mol_type = unassigned RNA
aagttcctgtgatgtcaagc

SEQ ID NO: 5588 - RNA, 20 nt, Homo sapiens
  source 1..20: mol_type = unassigned RNA
ctcgaccagcttgacatcac

SEQ ID NO: 5589 - RNA, 20 nt, Homo sapiens
  source 1..20: mol_type = unassigned RNA
ctgacaggttttgaaagttt

SEQ ID NO: 5590 - RNA, 20 nt, Homo sapiens
  source 1..20: mol_type = unassigned RNA
tttcaaaacctgtcagtgat

SEQ ID NO: 5591 - RNA, 20 nt, Homo sapiens
  source 1..20: mol_type = unassigned RNA
ttcaaaacctgtcagtgatt

SEQ ID NO: 5592 - RNA, 20 nt, Homo sapiens
  source 1..20: mol_type = unassigned RNA
ttcggaacccaatcactgac

SEQ ID NO: 5593 - RNA, 20 nt, Homo sapiens
  source 1..20: mol_type = unassigned RNA
ccgaatcctcctcctgaaag

SEQ ID NO: 5594 - RNA, 20 nt, Homo sapiens
  source 1..20: mol_type = unassigned RNA
ccactttcaggaggaggatt

SEQ ID NO: 5595 - RNA, 20 nt, Homo sapiens
  source 1..20: mol_type = unassigned RNA
atcctcctcctgaaagtggc

SEQ ID NO: 5596 - RNA, 20 nt, Homo sapiens
  source 1..20: mol_type = unassigned RNA
tcctcctcctgaaagtggcc

SEQ ID NO: 5597 - RNA, 20 nt, Homo sapiens
  source 1..20: mol_type = unassigned RNA
acccggccactttcaggagg

SEQ ID NO: 5598 - RNA, 20 nt, Homo sapiens
  source 1..20: mol_type = unassigned RNA
taaacccggccactttcagg

SEQ ID NO: 5599 - RNA, 20 nt, Homo sapiens
  source 1..20: mol_type = unassigned RNA
gattaaacccggccactttc

SEQ ID NO: 5600 - RNA, 20 nt, Homo sapiens
  source 1..20: mol_type = unassigned RNA
cgtcatgagcagattaaacc

SEQ ID NO: 5601 - RNA, 20 nt, Homo sapiens
  source 1..20: mol_type = unassigned RNA
ttaatctgctcatgacgctg

SEQ ID NO: 5602 - RNA, 20 nt, Homo sapiens
  source 1..20: mol_type = unassigned RNA
tgctcatgacgctgcggctg

SEQ ID NO: 5603 - RNA, 20 nt, Homo sapiens
  source 1..20: mol_type = unassigned RNA
tcaaggcccctcacctcagc

SEQ ID NO: 5604 - RNA, 20 nt, Homo sapiens
  source 1..20: mol_type = unassigned RNA
aggaaggagcgagggagcac

SEQ ID NO: 5605 - RNA, 20 nt, Homo sapiens
  source 1..20: mol_type = unassigned RNA
caatgcagaggaaggagcga

SEQ ID NO: 5606 - RNA, 20 nt, Homo sapiens
  source 1..20: mol_type = unassigned RNA
gcaatgcagaggaaggagcg

SEQ ID NO: 5607 - RNA, 20 nt, Homo sapiens
  source 1..20: mol_type = unassigned RNA
aagaggggcaatgcagagga

SEQ ID NO: 5608 - RNA, 20 nt, Homo sapiens
  source 1..20: mol_type = unassigned RNA
ggagaagaggggcaatgcag

SEQ ID NO: 5609 - RNA, 20 nt, Homo sapiens
  source 1..20: mol_type = unassigned RNA
tctgtttggagagggagaag

SEQ ID NO: 5610 - RNA, 20 nt, Homo sapiens
  source 1..20: mol_type = unassigned RNA
tcttctccctctccaaacag

SEQ ID NO: 5611 - RNA, 20 nt, Homo sapiens
  source 1..20: mol_type = unassigned RNA
cttctccctctccaaacaga

SEQ ID NO: 5612 - RNA, 20 nt, Homo sapiens
  source 1..20: mol_type = unassigned RNA
gagttccctctgtttggaga

SEQ ID NO: 5613 - RNA, 20 nt, Homo sapiens
  source 1..20: mol_type = unassigned RNA
agagttccctctgtttggag

SEQ ID NO: 5614 - RNA, 20 nt, Homo sapiens
  source 1..20: mol_type = unassigned RNA
gtaggagagttccctctgtt

SEQ ID NO: 5615 - RNA, 20 nt, Homo sapiens
  source 1..20: mol_type = unassigned RNA
gaactctcctacccccaagg

SEQ ID NO: 5616 - RNA, 20 nt, Homo sapiens
  source 1..20: mol_type = unassigned RNA
gctttcacctccttgggggt

SEQ ID NO: 5617 - RNA, 20 nt, Homo sapiens
  source 1..20: mol_type = unassigned RNA
agcagctttcacctccttgg

SEQ ID NO: 5618 - RNA, 20 nt, Homo sapiens
  source 1..20: mol_type = unassigned RNA
tagcagctttcacctccttg

SEQ ID NO: 5619 - RNA, 20 nt, Homo sapiens
  source 1..20: mol_type = unassigned RNA
gtagcagctttcacctcctt

SEQ ID NO: 5620 - RNA, 20 nt, Homo sapiens
  source 1..20: mol_type = unassigned RNA
ctaccacctctgtgcccccc

SEQ ID NO: 5621 - RNA, 20 nt, Homo sapiens
  source 1..20: mol_type = unassigned RNA
ttgccgggggggcacagagg

SEQ ID NO: 5622 - RNA, 20 nt, Homo sapiens
  source 1..20: mol_type = unassigned RNA
gcattgccgggggggcacag

SEQ ID NO: 5623 - RNA, 20 nt, Homo sapiens
  source 1..20: mol_type = unassigned RNA
agttggtggcattgccgggg

SEQ ID NO: 5624 - RNA, 20 nt, Homo sapiens
  source 1..20: mol_type = unassigned RNA
cagggaagaagcctgtggcc

SEQ ID NO: 5625 - RNA, 20 nt, Homo sapiens
  source 1..20: mol_type = unassigned RNA
gtggtcagggaagaagcctg

SEQ ID NO: 5626 - RNA, 20 nt, Homo sapiens
  source 1..20: mol_type = unassigned RNA
ctgaccacgtggagctgagc

SEQ ID NO: 5627 - RNA, 20 nt, Homo sapiens
  source 1..20: mol_type = unassigned RNA
cacggacccgcagcccctca

SEQ ID NO: 5628 - RNA, 20 nt, Homo sapiens
  source 1..20: mol_type = unassigned RNA
ggtgcacagtggggtcagca

SEQ ID NO: 5629 - RNA, 20 nt, Homo sapiens
  source 1..20: mol_type = unassigned RNA
gacgggtttggccctatcct

SEQ ID NO: 5630 - RNA, 20 nt, Homo sapiens
  source 1..20: mol_type = unassigned RNA
tggctcaaacacagcgacct

SEQ ID NO: 5631 - RNA, 20 nt, Homo sapiens
  source 1..20: mol_type = unassigned RNA
aggcttcttccctgaccacg

SEQ ID NO: 5632 - RNA, 20 nt, Homo sapiens
  source 1..20: mol_type = unassigned RNA
cagctcagctccacgtggtc

SEQ ID NO: 5633 - RNA, 20 nt, Homo sapiens
  source 1..20: mol_type = unassigned RNA
gcgctgacgatctgggtgac

SEQ ID NO: 5634 - RNA, 20 nt, Homo sapiens
  source 1..20: mol_type = unassigned RNA
ctttccagaggacctgaaca

SEQ ID NO: 5635 - RNA, 20 nt, Homo sapiens
  source 1..20: mol_type = unassigned RNA
tcaaacacagcgacctcggg

SEQ ID NO: 5636 - RNA, 20 nt, Homo sapiens
  source 1..20: mol_type = unassigned RNA
tgacgggtttggccctatcc

SEQ ID NO: 5637 - RNA, 20 nt, Homo sapiens
  source 1..20: mol_type = unassigned RNA
ggcgctgacgatctgggtga

SEQ ID NO: 5638 - RNA, 20 nt, Homo sapiens
  source 1..20: mol_type = unassigned RNA
cgggtgggaacaccttgttc

SEQ ID NO: 5639 - RNA, 20 nt, Homo sapiens
  source 1..20: mol_type = unassigned RNA
gaacaaggtgttcccacccg

SEQ ID NO: 5640 - RNA, 20 nt, Homo sapiens
  source 1..20: mol_type = unassigned RNA
caaacacagcgacctcgggt

SEQ ID NO: 5641 - RNA, 20 nt, Homo sapiens
  source 1..20: mol_type = unassigned RNA
ggctcaaacacagcgacctc

SEQ ID NO: 5642 - RNA, 20 nt, Homo sapiens
  source 1..20: mol_type = unassigned RNA
agctcagctccacgtggtca

SEQ ID NO: 5643 - RNA, 20 nt, Homo sapiens
  source 1..20: mol_type = unassigned RNA
gacgatctgggtgacgggtt

SEQ ID NO: 5644 - RNA, 20 nt, Homo sapiens
  source 1..20: mol_type = unassigned RNA
tatcaggctcctctgctacg

SEQ ID NO: 5645 - RNA, 20 nt, Homo sapiens
  source 1..20: mol_type = unassigned RNA
atcaggctcctctgctacgt

SEQ ID NO: 5646 - RNA, 20 nt, Homo sapiens
  source 1..20: mol_type = unassigned RNA
ctacgtgggcttttattttc

SEQ ID NO: 5647 - RNA, 20 nt, Homo sapiens
  source 1..20: mol_type = unassigned RNA
acgtgggcttttattttctg

SEQ ID NO: 5648 - RNA, 20 nt, Homo sapiens
  source 1..20: mol_type = unassigned RNA
cgtgggcttttattttctgg

SEQ ID NO: 5649 - RNA, 20 nt, Homo sapiens
  source 1..20: mol_type = unassigned RNA
aataaaagcccacgtagcag

SEQ ID NO: 5650 - RNA, 20 nt, Homo sapiens
  source 1..20: mol_type = unassigned RNA
accccaagataccttgttat

SEQ ID NO: 5651 - RNA, 20 nt, Homo sapiens
  source 1..20: mol_type = unassigned RNA
agataccttgttatagggac

SEQ ID NO: 5652 - RNA, 20 nt, Homo sapiens
  source 1..20: mol_type = unassigned RNA
gacaggaaagaagatcactc

SEQ ID NO: 5653 - RNA, 20 nt, Homo sapiens
  source 1..20: mol_type = unassigned RNA
tctggaatgttctcaaacca

SEQ ID NO: 5654 - RNA, 20 nt, Homo sapiens
  source 1..20: mol_type = unassigned RNA
ctggaatgttctcaaaccat

SEQ ID NO: 5655 - RNA, 20 nt, Homo sapiens
  source 1..20: mol_type = unassigned RNA
tactggtatcaacaagatcc

SEQ ID NO: 5656 - RNA, 20 nt, Homo sapiens
  source 1..20: mol_type = unassigned RNA
gtatcaacaagatccaggaa

SEQ ID NO: 5657 - RNA, 20 nt, Homo sapiens
  source 1..20: mol_type = unassigned RNA
cacctcatccactattccta

SEQ ID NO: 5658 - RNA, 20 nt, Homo sapiens
  source 1..20: mol_type = unassigned RNA
ggagttaattccacagagaa

SEQ ID NO: 5659 - RNA, 20 nt, Homo sapiens
  source 1..20: mol_type = unassigned RNA
agtcaacagtctccagaata

SEQ ID NO: 5660 - RNA, 20 nt, Homo sapiens
  source 1..20: mol_type = unassigned RNA
aacagtctccagaataagga

SEQ ID NO: 5661 - RNA, 20 nt, Homo sapiens
  source 1..20: mol_type = unassigned RNA
ccctgaccctggagtctgcc

SEQ ID NO: 5662 - RNA, 20 nt, Homo sapiens
  source 1..20: mol_type = unassigned RNA
taacaaggtatcttggggtc

SEQ ID NO: 5663 - RNA, 20 nt, Homo sapiens
  source 1..20: mol_type = unassigned RNA
ccctataacaaggtatcttg

SEQ ID NO: 5664 - RNA, 20 nt, Homo sapiens
  source 1..20: mol_type = unassigned RNA
tccctataacaaggtatctt

SEQ ID NO: 5665 - RNA, 20 nt, Homo sapiens
  source 1..20: mol_type = unassigned RNA
gtccctataacaaggtatct

SEQ ID NO: 5666 - RNA, 20 nt, Homo sapiens
  source 1..20: mol_type = unassigned RNA
tctttcctgtccctataaca

SEQ ID NO: 5667 - RNA, 20 nt, Homo sapiens
  source 1..20: mol_type = unassigned RNA
gataccagtacattttgtca

SEQ ID NO: 5668 - RNA, 20 nt, Homo sapiens
  source 1..20: mol_type = unassigned RNA
atgaggtgtagttccattcc

SEQ ID NO: 5669 - RNA, 20 nt, Homo sapiens
  source 1..20: mol_type = unassigned RNA
ctccataggaatagtggatg

SEQ ID NO: 5670 - RNA, 20 nt, Homo sapiens
  source 1..20: mol_type = unassigned RNA
aattaactccataggaatag

SEQ ID NO: 5671 - RNA, 20 nt, Homo sapiens
  source 1..20: mol_type = unassigned RNA
ctctgtggaattaactccat

SEQ ID NO: 5672 - RNA, 20 nt, Homo sapiens
  source 1..20: mol_type = unassigned RNA
tctggagactgttgactcag

SEQ ID NO: 5673 - RNA, 20 nt, Homo sapiens
  source 1..20: mol_type = unassigned RNA
aaaatgctccgtccttattc

SEQ ID NO: 5674 - RNA, 20 nt, Homo sapiens
  source 1..20: mol_type = unassigned RNA
cctggcagactccagggtca

SEQ ID NO: 5675 - RNA, 20 nt, Homo sapiens
  source 1..20: mol_type = unassigned RNA
gcctggcagactccagggtc

SEQ ID NO: 5676 - RNA, 20 nt, Homo sapiens
  source 1..20: mol_type = unassigned RNA
tgagggcctggcagactcca

SEQ ID NO: 5677 - RNA, 20 nt, Homo sapiens
  source 1..20: mol_type = unassigned RNA
gtgagggcctggcagactcc

SEQ ID NO: 5678 - RNA, 20 nt, Homo sapiens
  source 1..20: mol_type = unassigned RNA
gaggtactgagaggtatgtg

SEQ ID NO: 5679 - RNA, 20 nt, Homo sapiens
  source 1..20: mol_type = unassigned RNA
gctggcacagaggtactgag

SEQ ID NO: 5680 - RNA, 20 nt, Homo sapiens
  source 1..20: mol_type = unassigned RNA
tgtattcactgctggcacag

SEQ ID NO: 5681 - RNA, 20 nt, Homo sapiens
  source 1..20: mol_type = unassigned RNA
gagctgtctggttctggtag

SEQ ID NO: 5682 - RNA, 20 nt, Homo sapiens
  source 1..20: mol_type = unassigned RNA
agagctgtctggttctggta

SEQ ID NO: 5683 - RNA, 20 nt, Homo sapiens
  source 1..20: mol_type = unassigned RNA
gagagctgtctggttctggt

SEQ ID NO: 5684 - RNA, 20 nt, Homo sapiens
  source 1..20: mol_type = unassigned RNA
ctctgagagctgtctggttc

SEQ ID NO: 5685 - RNA, 20 nt, Homo sapiens
  source 1..20: mol_type = unassigned RNA
gggttgctctgagagctgtc

SEQ ID NO: 5686 - RNA, 20 nt, Homo sapiens
  source 1..20: mol_type = unassigned RNA
gaaaaacgtgttcccaccca

SEQ ID NO: 5687 - RNA, 20 nt, Homo sapiens
  source 1..20: mol_type = unassigned RNA
aggcttctaccccgaccacg

SEQ ID NO: 5688 - RNA, 20 nt, Homo sapiens
  source 1..20: mol_type = unassigned RNA
ccgaccacgtggagctgagc

SEQ ID NO: 5689 - RNA, 20 nt, Homo sapiens
  source 1..20: mol_type = unassigned RNA
cacagacccgcagcccctca

SEQ ID NO: 5690 - RNA, 20 nt, Homo sapiens
  source 1..20: mol_type = unassigned RNA
tgggtgggaacacgtttttc

SEQ ID NO: 5691 - RNA, 20 nt, Homo sapiens
  source 1..20: mol_type = unassigned RNA
caaacacagcgaccttgggt

SEQ ID NO: 5692 - RNA, 20 nt, Homo sapiens
  source 1..20: mol_type = unassigned RNA
tcaaacacagcgaccttggg

SEQ ID NO: 5693 - RNA, 20 nt, Homo sapiens
  source 1..20: mol_type = unassigned RNA
ggctcaaacacagcgacctt

SEQ ID NO: 5694 - RNA, 20 nt, Homo sapiens
  source 1..20: mol_type = unassigned RNA
tggctcaaacacagcgacct

SEQ ID NO: 5695 - RNA, 20 nt, Homo sapiens
  source 1..20: mol_type = unassigned RNA
cggggtagaagcctgtggcc

SEQ ID NO: 5696 - RNA, 20 nt, Homo sapiens
  source 1..20: mol_type = unassigned RNA
gtggtcggggtagaagcctg

SEQ ID NO: 5697 - RNA, 20 nt, Homo sapiens
  source 1..20: mol_type = unassigned RNA
agctcagctccacgtggtcg

SEQ ID NO: 5698 - RNA, 20 nt, Homo sapiens
  source 1..20: mol_type = unassigned RNA
cagctcagctccacgtggtc

SEQ ID NO: 5699 - RNA, 20 nt, Homo sapiens
  source 1..20: mol_type = unassigned RNA
ccagctcagctccacgtggt

SEQ ID NO: 5700 - RNA, 20 nt, Homo sapiens
  source 1..20: mol_type = unassigned RNA
gacaggtttggccctatcct

SEQ ID NO: 5701 - RNA, 20 nt, Homo sapiens
  source 1..20: mol_type = unassigned RNA
tgacaggtttggccctatcc

SEQ ID NO: 5702 - RNA, 20 nt, Homo sapiens
  source 1..20: mol_type = unassigned RNA
gacgatctgggtgacaggtt

SEQ ID NO: 5703 - RNA, 20 nt, Homo sapiens
  source 1..20: mol_type = unassigned RNA
gcgctgacgatctgggtgac

SEQ ID NO: 5704 - RNA, 20 nt, Homo sapiens
  source 1..20: mol_type = unassigned RNA
ccctgttttctttcagactg

SEQ ID NO: 5705 - RNA, 20 nt, Homo sapiens
  source 1..20: mol_type = unassigned RNA
aggagagactcacttaccgg

SEQ ID NO: 5706 - RNA, 20 nt, Homo sapiens
  source 1..20: mol_type = unassigned RNA
aaaaggagagactcacttac

SEQ ID NO: 5707 - RNA, 20 nt, Homo sapiens
  source 1..20: mol_type = unassigned RNA
tcaacagagtcttaccagca

SEQ ID NO: 5708 - RNA, 20 nt, Homo sapiens
  source 1..20: mol_type = unassigned RNA
caacagagtcttaccagcaa

SEQ ID NO: 5709 - RNA, 20 nt, Homo sapiens
  source 1..20: mol_type = unassigned RNA
aacagagtcttaccagcaag

SEQ ID NO: 5710 - RNA, 20 nt, Homo sapiens
  source 1..20: mol_type = unassigned RNA
atcctctatgagatcttgct

SEQ ID NO: 5711 - RNA, 20 nt, Homo sapiens
  source 1..20: mol_type = unassigned RNA
tcctctatgagatcttgcta

SEQ ID NO: 5712 - RNA, 20 nt, Homo sapiens
  source 1..20: mol_type = unassigned RNA
ctatgagatcttgctaggga

SEQ ID NO: 5713 - RNA, 20 nt, Homo sapiens
  source 1..20: mol_type = unassigned RNA
ggccaccttgtatgccgtgc

SEQ ID NO: 5714 - RNA, 20 nt, Homo sapiens
  source 1..20: mol_type = unassigned RNA
ggtcagtgccctcgtgctga

SEQ ID NO: 5715 - RNA, 20 nt, Homo sapiens
  source 1..20: mol_type = unassigned RNA
tggcagacaggaccccttgc

SEQ ID NO: 5716 - RNA, 20 nt, Homo sapiens
  source 1..20: mol_type = unassigned RNA
catagaggatggtggcagac

SEQ ID NO: 5717 - RNA, 20 nt, Homo sapiens
  source 1..20: mol_type = unassigned RNA
caagatctcatagaggatgg

SEQ ID NO: 5718 - RNA, 20 nt, Homo sapiens
  source 1..20: mol_type = unassigned RNA
tagcaagatctcatagagga

SEQ ID NO: 5719 - RNA, 20 nt, Homo sapiens
  source 1..20: mol_type = unassigned RNA
tccctagcaagatctcatag

SEQ ID NO: 5720 - RNA, 20 nt, Homo sapiens
  source 1..20: mol_type = unassigned RNA
tcaggcggaggtgagcggaa

SEQ ID NO: 5721 - RNA, 20 nt, Homo sapiens
  source 1..20: mol_type = unassigned RNA
ctcaggcggaggtgagcgga

SEQ ID NO: 5722 - RNA, 20 nt, Homo sapiens
  source 1..20: mol_type = unassigned RNA
actgctcaggcggaggtgag

SEQ ID NO: 5723 - RNA, 20 nt, Homo sapiens
  source 1..20: mol_type = unassigned RNA
gctcacctccgcctgagcag

SEQ ID NO: 5724 - RNA, 20 nt, Homo sapiens
  source 1..20: mol_type = unassigned RNA
cttctccactgctcaggcgg

SEQ ID NO: 5725 - RNA, 20 nt, Homo sapiens
  source 1..20: mol_type = unassigned RNA
cagtggagaaggcggcactc

SEQ ID NO: 5726 - RNA, 20 nt, Homo sapiens
  source 1..20: mol_type = unassigned RNA
tggagaaggcggcactctgg

SEQ ID NO: 5727 - RNA, 20 nt, Homo sapiens
  source 1..20: mol_type = unassigned RNA
ggagaaggcggcactctggt

SEQ ID NO: 5728 - RNA, 20 nt, Homo sapiens
  source 1..20: mol_type = unassigned RNA
gagaaggcggcactctggtg

SEQ ID NO: 5729 - RNA, 20 nt, Homo sapiens
  source 1..20: mol_type = unassigned RNA
aggcgccctggccagtcgtc

SEQ ID NO: 5730 - RNA, 20 nt, Homo sapiens
  source 1..20: mol_type = unassigned RNA
ggcgccctggccagtcgtct

SEQ ID NO: 5731 - RNA, 20 nt, Homo sapiens
  source 1..20: mol_type = unassigned RNA
gccctggccagtcgtctggg

SEQ ID NO: 5732 - RNA, 20 nt, Homo sapiens
  source 1..20: mol_type = unassigned RNA
caccgcccagacgactggcc

SEQ ID NO: 5733 - RNA, 20 nt, Homo sapiens
  source 1..20: mol_type = unassigned RNA
tgtagcaccgcccagacgac

SEQ ID NO: 5734 - RNA, 20 nt, Homo sapiens
  source 1..20: mol_type = unassigned RNA
cgtctgggcggtgctacaac

SEQ ID NO: 5735 - RNA, 20 nt, Homo sapiens
  source 1..20: mol_type = unassigned RNA
gtctgggcggtgctacaact

SEQ ID NO: 5736 - RNA, 20 nt, Homo sapiens
  source 1..20: mol_type = unassigned RNA
gggcggtgctacaactgggc

SEQ ID NO: 5737 - RNA, 20 nt, Homo sapiens
  source 1..20: mol_type = unassigned RNA
cggtgctacaactgggctgg

SEQ ID NO: 5738 - RNA, 20 nt, Homo sapiens
  source 1..20: mol_type = unassigned RNA
cacctacctaagaaccatcc

SEQ ID NO: 5739 - RNA, 20 nt, Homo sapiens
  source 1..20: mol_type = unassigned RNA
gagaaggtgggggggttcca

SEQ ID NO: 5740 - RNA, 20 nt, Homo sapiens
  source 1..20: mol_type = unassigned RNA
cggtcaccacgagcagggct

SEQ ID NO: 5741 - RNA, 20 nt, Homo sapiens
  source 1..20: mol_type = unassigned RNA
tcggtcaccacgagcagggc

SEQ ID NO: 5742 - RNA, 20 nt, Homo sapiens
  source 1..20: mol_type = unassigned RNA
gccctgctcgtggtgaccga

SEQ ID NO: 5743 - RNA, 20 nt, Homo sapiens
  source 1..20: mol_type = unassigned RNA
cccttcggtcaccacgagca

SEQ ID NO: 5744 - RNA, 20 nt, Homo sapiens
  source 1..20: mol_type = unassigned RNA
ccctgctcgtggtgaccgaa

SEQ ID NO: 5745 - RNA, 20 nt, Homo sapiens
  source 1..20: mol_type = unassigned RNA
ccccttcggtcaccacgagc

SEQ ID NO: 5746 - RNA, 20 nt, Homo sapiens
  source 1..20: mol_type = unassigned RNA
cctgctcgtggtgaccgaag

SEQ ID NO: 5747 - RNA, 20 nt, Homo sapiens
  source 1..20: mol_type = unassigned RNA
gaaggtggcgttgtcccctt

SEQ ID NO: 5748 - RNA, 20 nt, Homo sapiens
  source 1..20: mol_type = unassigned RNA
gttggagaagctgcaggtga

SEQ ID NO: 5749 - RNA, 20 nt, Homo sapiens
  source 1..20: mol_type = unassigned RNA
cacgaagctctccgatgtgt

SEQ ID NO: 5750 - RNA, 20 nt, Homo sapiens
  source 1..20: mol_type = unassigned RNA
cggagagcttcgtgctaaac

SEQ ID NO: 5751 - RNA, 20 nt, Homo sapiens
  source 1..20: mol_type = unassigned RNA
tctggttgctggggctcatg

SEQ ID NO: 5752 - RNA, 20 nt, Homo sapiens
  source 1..20: mol_type = unassigned RNA
gcttgtccgtctggttgctg

SEQ ID NO: 5753 - RNA, 20 nt, Homo sapiens
  source 1..20: mol_type = unassigned RNA
agcttgtccgtctggttgct

SEQ ID NO: 5754 - RNA, 20 nt, Homo sapiens
  source 1..20: mol_type = unassigned RNA
cagcttgtccgtctggttgc

SEQ ID NO: 5755 - RNA, 20 nt, Homo sapiens
  source 1..20: mol_type = unassigned RNA
cagcaaccagacggacaagc

SEQ ID NO: 5756 - RNA, 20 nt, Homo sapiens
  source 1..20: mol_type = unassigned RNA
aggcggccagcttgtccgtc

SEQ ID NO: 5757 - RNA, 20 nt, Homo sapiens
  source 1..20: mol_type = unassigned RNA
ctggctgcggtcctcgggga

SEQ ID NO: 5758 - RNA, 20 nt, Homo sapiens
  source 1..20: mol_type = unassigned RNA
cgggctggctgcggtcctcg

SEQ ID NO: 5759 - RNA, 20 nt, Homo sapiens
  source 1..20: mol_type = unassigned RNA
ccgggctggctgcggtcctc

SEQ ID NO: 5760 - RNA, 20 nt, Homo sapiens
  source 1..20: mol_type = unassigned RNA
cccgaggaccgcagccagcc

SEQ ID NO: 5761 - RNA, 20 nt, Homo sapiens
  source 1..20: mol_type = unassigned RNA
gccgggctggctgcggtcct

SEQ ID NO: 5762 - RNA, 20 nt, Homo sapiens
  source 1..20: mol_type = unassigned RNA
cggaagcggcagtcctggcc

SEQ ID NO: 5763 - RNA, 20 nt, Homo sapiens
  source 1..20: mol_type = unassigned RNA
acggaagcggcagtcctggc

SEQ ID NO: 5764 - RNA, 20 nt, Homo sapiens
  source 1..20: mol_type = unassigned RNA
tgacacggaagcggcagtcc

SEQ ID NO: 5765 - RNA, 20 nt, Homo sapiens
  source 1..20: mol_type = unassigned RNA
gcagttgtgtgacacggaag

SEQ ID NO: 5766 - RNA, 20 nt, Homo sapiens
  source 1..20: mol_type = unassigned RNA
cgtgtcacacaactgcccaa

SEQ ID NO: 5767 - RNA, 20 nt, Homo sapiens
  source 1..20: mol_type = unassigned RNA
gtgtcacacaactgcccaac

SEQ ID NO: 5768 - RNA, 20 nt, Homo sapiens
  source 1..20: mol_type = unassigned RNA
atgtggaagtcacgcccgtt

SEQ ID NO: 5769 - RNA, 20 nt, Homo sapiens
  source 1..20: mol_type = unassigned RNA
catgtggaagtcacgcccgt

SEQ ID NO: 5770 - RNA, 20 nt, Homo sapiens
  source 1..20: mol_type = unassigned RNA
gcgtgacttccacatgagcg

SEQ ID NO: 5771 - RNA, 20 nt, Homo sapiens
  source 1..20: mol_type = unassigned RNA
acttccacatgagcgtggtc

SEQ ID NO: 5772 - RNA, 20 nt, Homo sapiens
  source 1..20: mol_type = unassigned RNA
cttccacatgagcgtggtca

SEQ ID NO: 5773 - RNA, 20 nt, Homo sapiens
  source 1..20: mol_type = unassigned RNA
gggccctgaccacgctcatg

SEQ ID NO: 5774 - RNA, 20 nt, Homo sapiens
  source 1..20: mol_type = unassigned RNA
acatgagcgtggtcagggcc

SEQ ID NO: 5775 - RNA, 20 nt, Homo sapiens
  source 1..20: mol_type = unassigned RNA
agggcccggcgcaatgacag

SEQ ID NO: 5776 - RNA, 20 nt, Homo sapiens
  source 1..20: mol_type = unassigned RNA
ggtgccgctgtcattgcgcc

SEQ ID NO: 5777 - RNA, 20 nt, Homo sapiens
  source 1..20: mol_type = unassigned RNA
aggtgccgctgtcattgcgc

SEQ ID NO: 5778 - RNA, 20 nt, Homo sapiens
  source 1..20: mol_type = unassigned RNA
gacagcggcacctacctctg

SEQ ID NO: 5779 - RNA, 20 nt, Homo sapiens
  source 1..20: mol_type = unassigned RNA
acagcggcacctacctctgt

SEQ ID NO: 5780 - RNA, 20 nt, Homo sapiens
  source 1..20: mol_type = unassigned RNA
ccagggagatggccccacag

SEQ ID NO: 5781 - RNA, 20 nt, Homo sapiens
  source 1..20: mol_type = unassigned RNA
gatctgcgccttgggggcca

SEQ ID NO: 5782 - RNA, 20 nt, Homo sapiens
  source 1..20: mol_type = unassigned RNA
tgatctgcgccttgggggcc

SEQ ID NO: 5783 - RNA, 20 nt, Homo sapiens
  source 1..20: mol_type = unassigned RNA
ctctttgatctgcgccttgg

SEQ ID NO: 5784 - RNA, 20 nt, Homo sapiens
  source 1..20: mol_type = unassigned RNA
tctctttgatctgcgccttg

SEQ ID NO: 5785 - RNA, 20 nt, Homo sapiens
  source 1..20: mol_type = unassigned RNA
ctctctttgatctgcgcctt

SEQ ID NO: 5786 - RNA, 20 nt, Homo sapiens
  source 1..20: mol_type = unassigned RNA
gctctctttgatctgcgcct

SEQ ID NO: 5787 - RNA, 20 nt, Homo sapiens
  source 1..20: mol_type = unassigned RNA
cgcagatcaaagagagcctg

SEQ ID NO: 5788 - RNA, 20 nt, Homo sapiens
  source 1..20: mol_type = unassigned RNA
gcagatcaaagagagcctgc

SEQ ID NO: 5789 - RNA, 20 nt, Homo sapiens
  source 1..20: mol_type = unassigned RNA
agagcctgcgggcagagctc

SEQ ID NO: 5790 - RNA, 20 nt, Homo sapiens
  source 1..20: mol_type = unassigned RNA
agggtttggaactggccggc

SEQ ID NO: 5791 - RNA, 20 nt, Homo sapiens
  source 1..20: mol_type = unassigned RNA
caccagggtttggaactggc

SEQ ID NO: 5792 - RNA, 20 nt, Homo sapiens
  source 1..20: mol_type = unassigned RNA
cggccagttccaaaccctgg

SEQ ID NO: 5793 - RNA, 20 nt, Homo sapiens
  source 1..20: mol_type = unassigned RNA
caaccaccagggtttggaac

SEQ ID NO: 5794 - RNA, 20 nt, Homo sapiens
  source 1..20: mol_type = unassigned RNA
cagttccaaaccctggtggt

SEQ ID NO: 5795 - RNA, 20 nt, Homo sapiens
  source 1..20: mol_type = unassigned RNA
cgacaccaaccaccagggtt

SEQ ID NO: 5796 - RNA, 20 nt, Homo sapiens
  source 1..20: mol_type = unassigned RNA
aaccctggtggttggtgtcg

SEQ ID NO: 5797 - RNA, 20 nt, Homo sapiens
  source 1..20: mol_type = unassigned RNA
accctggtggttggtgtcgt

SEQ ID NO: 5798 - RNA, 20 nt, Homo sapiens
  source 1..20: mol_type = unassigned RNA
gcccacgacaccaaccacca

SEQ ID NO: 5799 - RNA, 20 nt, Homo sapiens
  source 1..20: mol_type = unassigned RNA
cgcccacgacaccaaccacc

SEQ ID NO: 5800 - RNA, 20 nt, Homo sapiens
  source 1..20: mol_type = unassigned RNA
ctggtggttggtgtcgtggg

SEQ ID NO: 5801 - RNA, 20 nt, Homo sapiens
  source 1..20: mol_type = unassigned RNA
tggtgtcgtgggcggcctgc

SEQ ID NO: 5802 - RNA, 20 nt, Homo sapiens
  source 1..20: mol_type = unassigned RNA
ggtgtcgtgggcggcctgct

SEQ ID NO: 5803 - RNA, 20 nt, Homo sapiens
  source 1..20: mol_type = unassigned RNA
ggtgctgctagtctgggtcc

SEQ ID NO: 5804 - RNA, 20 nt, Homo sapiens
  source 1..20: mol_type = unassigned RNA
tcctggccgtcatctgctcc

SEQ ID NO: 5805 - RNA, 20 nt, Homo sapiens
  source 1..20: mol_type = unassigned RNA
cccgggagcagatgacggcc

SEQ ID NO: 5806 - RNA, 20 nt, Homo sapiens
  source 1..20: mol_type = unassigned RNA
cctggccgtcatctgctccc

SEQ ID NO: 5807 - RNA, 20 nt, Homo sapiens
  source 1..20: mol_type = unassigned RNA
gacgttacctcgtgcggccc

SEQ ID NO: 5808 - RNA, 20 nt, Homo sapiens
  source 1..20: mol_type = unassigned RNA
tgacgttacctcgtgcggcc

SEQ ID NO: 5809 - RNA, 20 nt, Homo sapiens
  source 1..20: mol_type = unassigned RNA
tgggatgacgttacctcgtg

SEQ ID NO: 5810 - RNA, 20 nt, Homo sapiens
  source 1..20: mol_type = unassigned RNA
ctgcagggacaataggagcc

SEQ ID NO: 5811 - RNA, 20 nt, Homo sapiens
  source 1..20: mol_type = unassigned RNA
acaataggagccaggcgcac

SEQ ID NO: 5812 - RNA, 20 nt, Homo sapiens
  source 1..20: mol_type = unassigned RNA
caggggctggccggtgcgcc

SEQ ID NO: 5813 - RNA, 20 nt, Homo sapiens
  source 1..20: mol_type = unassigned RNA
aaaagagtgagactcaccag

SEQ ID NO: 5814 - RNA, 20 nt, Homo sapiens
  source 1..20: mol_type = unassigned RNA
gaaaagagtgagactcacca

SEQ ID NO: 5815 - RNA, 20 nt, Homo sapiens
  source 1..20: mol_type = unassigned RNA
ggaaaagagtgagactcacc

SEQ ID NO: 5816 - RNA, 25 nt, Homo sapiens
  source 1..25: mol_type = unassigned RNA
tctcaaacaaatgtgtcacaaagta

SEQ ID NO: 5817 - RNA, 25 nt, Homo sapiens
  source 1..25: mol_type = unassigned RNA
cacagacaaaactgtgctagacatg

SEQ ID NO: 5818 - RNA, 25 nt, Homo sapiens
  source 1..25: mol_type = unassigned RNA
aaaactgtgctagacatgaggtcta

SEQ ID NO: 5819 - RNA, 25 nt, Homo sapiens
  source 1..25: mol_type = unassigned RNA
atggacttcaagagcaacagtgctg

SEQ ID NO: 5820 - RNA, 25 nt, Homo sapiens
  source 1..25: mol_type = unassigned RNA
cttcaagagcaacagtgctgtggcc

SEQ ID NO: 5821 - RNA, 25 nt, Homo sapiens
  source 1..25: mol_type = unassigned RNA
ctgggctggggaagaaggtgtcttc

SEQ ID NO: 5822 - RNA, 25 nt, Homo sapiens
  source 1..25: mol_type = unassigned RNA
tcttctggaataatgctgttgttga

SEQ ID NO: 5823 - RNA, 25 nt, Homo sapiens
  source 1..25: mol_type = unassigned RNA
catgcaaagtcagatttgttgctcc

SEQ ID NO: 5824 - RNA, 25 nt, Homo sapiens
  source 1..25: mol_type = unassigned RNA
gacacatttgtttgagaatcaaaat

SEQ ID NO: 5825 - RNA, 25 nt, Homo sapiens
  source 1..25: mol_type = unassigned RNA
tgtttgagaatcaaaatcggtgaat

SEQ ID NO: 5826 - RNA, 25 nt, Homo sapiens
  source 1..25: mol_type = unassigned RNA
gtgaataggcagacagacttgtcac

SEQ ID NO: 5827 - RNA, 25 nt, Homo sapiens
  source 1..25: mol_type = unassigned RNA
gtcactggatttagagtctctcagc

SEQ ID NO: 5828 - RNA, 25 nt, Homo sapiens
  source 1..25: mol_type = unassigned RNA
gatttagagtctctcagctggtaca

SEQ ID NO: 5829 - RNA, 25 nt, Homo sapiens
  source 1..25: mol_type = unassigned RNA
tagagtctctcagctggtacacggc

SEQ ID NO: 5830 - RNA, 25 nt, Homo sapiens
  source 1..25: mol_type = unassigned RNA
agagtctctcagctggtacacggca

SEQ ID NO: 5831 - RNA, 25 nt, Homo sapiens
  source 1..25: mol_type = unassigned RNA
ctctcagctggtacacggcagggtc

SEQ ID NO: 5832 - RNA, 25 nt, Homo sapiens
  source 1..25: mol_type = unassigned RNA
tctcagctggtacacggcagggtca

SEQ ID NO: 5833 - RNA, 25 nt, Homo sapiens
  source 1..25: mol_type = unassigned RNA
ctggtacacggcagggtcagggttc

SEQ ID NO: 5834 - RNA, 25 nt, Homo sapiens
  source 1..25: mol_type = unassigned RNA
gcagggtcagggttctggatatctg

SEQ ID NO: 5835 - RNA, 25 nt, Homo sapiens
  source 1..25: mol_type = unassigned RNA
cagggtcagggttctggatatctgt

SEQ ID NO: 5836 - RNA, 25 nt, Homo sapiens
  source 1..25: mol_type = unassigned RNA
gggttctggatatctgtgggacaag

SEQ ID NO: 5837 - RNA, 25 nt, Homo sapiens
  source 1..25: mol_type = unassigned RNA
tggatatctgtgggacaagaggatc

SEQ ID NO: 5838 - RNA, 25 nt, Homo sapiens
  source 1..25: mol_type = unassigned RNA
ggatatctgtgggacaagaggatca

SEQ ID NO: 5839 - RNA, 25 nt, Homo sapiens
  source 1..25: mol_type = unassigned RNA
tctgtgggacaagaggatcagggtt

SEQ ID NO: 5840 - RNA, 25 nt, Homo sapiens
  source 1..25: mol_type = unassigned RNA
ttagaaagttcctgtgatgtcaagc

SEQ ID NO: 5841 - RNA, 25 nt, Homo sapiens
  source 1..25: mol_type = unassigned RNA
agctggtcgagaaaagctttgaaac

SEQ ID NO: 5842 - RNA, 25 nt, Homo sapiens
  source 1..25: mol_type = unassigned RNA
agaaaagctttgaaacaggtaagac

SEQ ID NO: 5843 - RNA, 25 nt, Homo sapiens
  source 1..25: mol_type = unassigned RNA
gaaaagctttgaaacaggtaagaca

SEQ ID NO: 5844 - RNA, 25 nt, Homo sapiens
  source 1..25: mol_type = unassigned RNA
aaaagctttgaaacaggtaagacag

SEQ ID NO: 5845 - RNA, 25 nt, Homo sapiens
  source 1..25: mol_type = unassigned RNA
aaacaggtaagacaggggtctagcc

SEQ ID NO: 5846 - RNA, 25 nt, Homo sapiens
  source 1..25: mol_type = unassigned RNA
aacaggtaagacaggggtctagcct

SEQ ID NO: 5847 - RNA, 25 nt, Homo sapiens
  source 1..25: mol_type = unassigned RNA
cttttctcgaccagcttgacatcac

SEQ ID NO: 5848 - RNA, 25 nt, Homo sapiens
  source 1..25: mol_type = unassigned RNA
cttgacatcacaggaactttctaaa

SEQ ID NO: 5849 - RNA, 25 nt, Homo sapiens
  source 1..25: mol_type = unassigned RNA
taaactttcaaaacctgtcagtgat

SEQ ID NO: 5850 - RNA, 25 nt, Homo sapiens
  source 1..25: mol_type = unassigned RNA
aaactttcaaaacctgtcagtgatt

SEQ ID NO: 5851 - RNA, 25 nt, Homo sapiens
  source 1..25: mol_type = unassigned RNA
gggttccgaatcctcctcctgaaag

SEQ ID NO: 5852 - RNA, 25 nt, Homo sapiens
  source 1..25: mol_type = unassigned RNA
tccgaatcctcctcctgaaagtggc

SEQ ID NO: 5853 - RNA, 25 nt, Homo sapiens
  source 1..25: mol_type = unassigned RNA
ccgaatcctcctcctgaaagtggcc

SEQ ID NO: 5854 - RNA, 25 nt, Homo sapiens
  source 1..25: mol_type = unassigned RNA
cgggtttaatctgctcatgacgctg

SEQ ID NO: 5855 - RNA, 25 nt, Homo sapiens
  source 1..25: mol_type = unassigned RNA
taatctgctcatgacgctgcggctg

SEQ ID NO: 5856 - RNA, 25 nt, Homo sapiens
  source 1..25: mol_type = unassigned RNA
tgacgctgcggctgtggtccagctg

SEQ ID NO: 5857 - RNA, 25 nt, Homo sapiens
  source 1..25: mol_type = unassigned RNA
ctgcggctgtggtccagctgaggtg

SEQ ID NO: 5858 - RNA, 25 nt, Homo sapiens
  source 1..25: mol_type = unassigned RNA
tgcggctgtggtccagctgaggtga

SEQ ID NO: 5859 - RNA, 25 nt, Homo sapiens
  source 1..25: mol_type = unassigned RNA
gcggctgtggtccagctgaggtgag

SEQ ID NO: 5860 - RNA, 25 nt, Homo sapiens
  source 1..25: mol_type = unassigned RNA
cagctgaggtgaggggccttgaagc

SEQ ID NO: 5861 - RNA, 25 nt, Homo sapiens
  source 1..25: mol_type = unassigned RNA
agctgaggtgaggggccttgaagct

SEQ ID NO: 5862 - RNA, 25 nt, Homo sapiens
  source 1..25: mol_type = unassigned RNA
cagcttcaaggcccctcacctcagc

SEQ ID NO: 5863 - RNA, 25 nt, Homo sapiens
  source 1..25: mol_type = unassigned RNA
cgcagcgtcatgagcagattaaacc

SEQ ID NO: 5864 - RNA, 25 nt, Homo sapiens
  source 1..25: mol_type = unassigned RNA
gagcagattaaacccggccactttc

SEQ ID NO: 5865 - RNA, 25 nt, Homo sapiens
  source 1..25: mol_type = unassigned RNA
cagattaaacccggccactttcagg

SEQ ID NO: 5866 - RNA, 25 nt, Homo sapiens
  source 1..25: mol_type = unassigned RNA
attaaacccggccactttcaggagg

SEQ ID NO: 5867 - RNA, 25 nt, Homo sapiens
  source 1..25: mol_type = unassigned RNA
cccggccactttcaggaggaggatt

SEQ ID NO: 5868 - RNA, 25 nt, Homo sapiens
  source 1..25: mol_type = unassigned RNA
gaggattcggaacccaatcactgac

SEQ ID NO: 5869 - RNA, 25 nt, Homo sapiens
  source 1..25: mol_type = unassigned RNA
aatcactgacaggttttgaaagttt

SEQ ID NO: 5870 - RNA, 25 nt, Homo sapiens
  source 1..25: mol_type = unassigned RNA
ttaggttcgtatctgtaaaaccaag

SEQ ID NO: 5871 - RNA, 25 nt, Homo sapiens
  source 1..25: mol_type = unassigned RNA
tatctgtaaaaccaagaggccacag

SEQ ID NO: 5872 - RNA, 25 nt, Homo sapiens
  source 1..25: mol_type = unassigned RNA
gcccctcttctccctctccaaacag

SEQ ID NO: 5873 - RNA, 25 nt, Homo sapiens
  source 1..25: mol_type = unassigned RNA
cccctcttctccctctccaaacaga

SEQ ID NO: 5874 - RNA, 25 nt, Homo sapiens
  source 1..25: mol_type = unassigned RNA
aacagagggaactctcctaccccca

SEQ ID NO: 5875 - RNA, 25 nt, Homo sapiens
  source 1..25: mol_type = unassigned RNA
agagggaactctcctacccccaagg

SEQ ID NO: 5876 - RNA, 25 nt, Homo sapiens
  source 1..25: mol_type = unassigned RNA
agctgctaccacctctgtgcccccc

SEQ ID NO: 5877 - RNA, 25 nt, Homo sapiens
  source 1..25: mol_type = unassigned RNA
gtgcccccccggcaatgccaccaac

SEQ ID NO: 5878 - RNA, 25 nt, Homo sapiens
  source 1..25: mol_type = unassigned RNA
gctgcttgtcactgcctgacattca

SEQ ID NO: 5879 - RNA, 25 nt, Homo sapiens
  source 1..25: mol_type = unassigned RNA
tgtcactgcctgacattcacggcag

SEQ ID NO: 5880 - RNA, 25 nt, Homo sapiens
  source 1..25: mol_type = unassigned RNA
ctgcctgacattcacggcagaggca

SEQ ID NO: 5881 - RNA, 25 nt, Homo sapiens
  source 1..25: mol_type = unassigned RNA
gaggcaaggctgctgcagcctcccc

SEQ ID NO: 5882 - RNA, 25 nt, Homo sapiens
  source 1..25: mol_type = unassigned RNA
actgcctccgccatcccacagatga

SEQ ID NO: 5883 - RNA, 25 nt, Homo sapiens
  source 1..25: mol_type = unassigned RNA
catcccacagatgatggatcttcag

SEQ ID NO: 5884 - RNA, 25 nt, Homo sapiens
  source 1..25: mol_type = unassigned RNA
atcccacagatgatggatcttcagt

SEQ ID NO: 5885 - RNA, 25 nt, Homo sapiens
  source 1..25: mol_type = unassigned RNA
atgatggatcttcagtgggttctct

SEQ ID NO: 5886 - RNA, 25 nt, Homo sapiens
  source 1..25: mol_type = unassigned RNA
tgatggatcttcagtgggttctctt

SEQ ID NO: 5887 - RNA, 25 nt, Homo sapiens
  source 1..25: mol_type = unassigned RNA
tcttcagtgggttctcttgggctct

SEQ ID NO: 5888 - RNA, 25 nt, Homo sapiens
  source 1..25: mol_type = unassigned RNA
gctctaggtcctgcagaatgttgtg

SEQ ID NO: 5889 - RNA, 25 nt, Homo sapiens
  source 1..25: mol_type = unassigned RNA
ctctaggtcctgcagaatgttgtga

SEQ ID NO: 5890 - RNA, 25 nt, Homo sapiens
  source 1..25: mol_type = unassigned RNA
tctaggtcctgcagaatgttgtgag

SEQ ID NO: 5891 - RNA, 25 nt, Homo sapiens
  source 1..25: mol_type = unassigned RNA
acatagtattcttcttctcaagacg

SEQ ID NO: 5892 - RNA, 25 nt, Homo sapiens
  source 1..25: mol_type = unassigned RNA
catagtattcttcttctcaagacgt

SEQ ID NO: 5893 - RNA, 25 nt, Homo sapiens
  source 1..25: mol_type = unassigned RNA
atagtattcttcttctcaagacgtg

SEQ ID NO: 5894 - RNA, 25 nt, Homo sapiens
  source 1..25: mol_type = unassigned RNA
tagtattcttcttctcaagacgtgg

SEQ ID NO: 5895 - RNA, 25 nt, Homo sapiens
  source 1..25: mol_type = unassigned RNA
agtattcttcttctcaagacgtggg

SEQ ID NO: 5896 - RNA, 25 nt, Homo sapiens
  source 1..25: mol_type = unassigned RNA
gtggggggaaattatctcattatcg

SEQ ID NO: 5897 - RNA, 25 nt, Homo sapiens
  source 1..25: mol_type = unassigned RNA
tcgaggccctgctatgctgtgtatc

SEQ ID NO: 5898 - RNA, 25 nt, Homo sapiens
  source 1..25: mol_type = unassigned RNA
cgaggccctgctatgctgtgtatct

SEQ ID NO: 5899 - RNA, 25 nt, Homo sapiens
  source 1..25: mol_type = unassigned RNA
tgccgatgccttcattaaaatgatt

SEQ ID NO: 5900 - RNA, 25 nt, Homo sapiens
  source 1..25: mol_type = unassigned RNA
agcagagactgtgcctctgtttgac

SEQ ID NO: 5901 - RNA, 25 nt, Homo sapiens
  source 1..25: mol_type = unassigned RNA
gcagagactgtgcctctgtttgact

SEQ ID NO: 5902 - RNA, 25 nt, Homo sapiens
  source 1..25: mol_type = unassigned RNA
gactgtgcctctgtttgactgggtt

SEQ ID NO: 5903 - RNA, 25 nt, Homo sapiens
  source 1..25: mol_type = unassigned RNA
gtgcctctgtttgactgggtttggt

SEQ ID NO: 5904 - RNA, 25 nt, Homo sapiens
  source 1..25: mol_type = unassigned RNA
actcctaccaaacccagtcaaacag

SEQ ID NO: 5905 - RNA, 25 nt, Homo sapiens
  source 1..25: mol_type = unassigned RNA
ctgctcttccaaatcattttaatga

SEQ ID NO: 5906 - RNA, 25 nt, Homo sapiens
  source 1..25: mol_type = unassigned RNA
ttccaaatcattttaatgaaggcat

SEQ ID NO: 5907 - RNA, 25 nt, Homo sapiens
  source 1..25: mol_type = unassigned RNA
tcattttaatgaaggcatcggcagc

SEQ ID NO: 5908 - RNA, 25 nt, Homo sapiens
  source 1..25: mol_type = unassigned RNA
aacacgcccagatacacagcatagc

SEQ ID NO: 5909 - RNA, 25 nt, Homo sapiens
  source 1..25: mol_type = unassigned RNA
acacgcccagatacacagcatagca

SEQ ID NO: 5910 - RNA, 25 nt, Homo sapiens
  source 1..25: mol_type = unassigned RNA
aaataaacccctcacaacattctgc

SEQ ID NO: 5911 - RNA, 25 nt, Homo sapiens
  source 1..25: mol_type = unassigned RNA
gaacccactgaagatccatcatctg

SEQ ID NO: 5912 - RNA, 25 nt, Homo sapiens
  source 1..25: mol_type = unassigned RNA
aacccactgaagatccatcatctgt

SEQ ID NO: 5913 - RNA, 25 nt, Homo sapiens
  source 1..25: mol_type = unassigned RNA
cactgaagatccatcatctgtggga

SEQ ID NO: 5914 - RNA, 25 nt, Homo sapiens
  source 1..25: mol_type = unassigned RNA
tgaagatccatcatctgtgggatgg

SEQ ID NO: 5915 - RNA, 25 nt, Homo sapiens
  source 1..25: mol_type = unassigned RNA
agatccatcatctgtgggatggcgg

SEQ ID NO: 5916 - RNA, 25 nt, Homo sapiens
  source 1..25: mol_type = unassigned RNA
tctgtgggatggcggaggcagtctc

SEQ ID NO: 5917 - RNA, 25 nt, Homo sapiens
  source 1..25: mol_type = unassigned RNA
ctgtgggatggcggaggcagtctct

SEQ ID NO: 5918 - RNA, 25 nt, Homo sapiens
  source 1..25: mol_type = unassigned RNA
tgtgggatggcggaggcagtctctg

SEQ ID NO: 5919 - RNA, 25 nt, Homo sapiens
  source 1..25: mol_type = unassigned RNA
atggcggaggcagtctctggggagc

SEQ ID NO: 5920 - RNA, 25 nt, Homo sapiens
  source 1..25: mol_type = unassigned RNA
gcggaggcagtctctggggagcagg

SEQ ID NO: 5921 - RNA, 25 nt, Homo sapiens
  source 1..25: mol_type = unassigned RNA
cggaggcagtctctggggagcagga

SEQ ID NO: 5922 - RNA, 25 nt, Homo sapiens
  source 1..25: mol_type = unassigned RNA
ggagcaggagggaatgtgcacagcc

SEQ ID NO: 5923 - RNA, 25 nt, Homo sapiens
  source 1..25: mol_type = unassigned RNA
gagcaggagggaatgtgcacagcca

SEQ ID NO: 5924 - RNA, 25 nt, Homo sapiens
  source 1..25: mol_type = unassigned RNA
agcaggagggaatgtgcacagccag

SEQ ID NO: 5925 - RNA, 25 nt, Homo sapiens
  source 1..25: mol_type = unassigned RNA
aggagggaatgtgcacagccagggg

SEQ ID NO: 5926 - RNA, 25 nt, Homo sapiens
  source 1..25: mol_type = unassigned RNA
cagccttgcctctgccgtgaatgtc

SEQ ID NO: 5927 - RNA, 25 nt, Homo sapiens
  source 1..25: mol_type = unassigned RNA
tgtcaggcagtgacaagcagcaata

SEQ ID NO: 5928 - RNA, 25 nt, Homo sapiens
  source 1..25: mol_type = unassigned RNA
gtcaggcagtgacaagcagcaataa

SEQ ID NO: 5929 - RNA, 25 nt, Homo sapiens
  source 1..25: mol_type = unassigned RNA
gtgacaagcagcaataagggaacag

SEQ ID NO: 5930 - RNA, 25 nt, Homo sapiens
  source 1..25: mol_type = unassigned RNA
tgacaagcagcaataagggaacaga

SEQ ID NO: 5931 - RNA, 25 nt, Homo sapiens
  source 1..25: mol_type = unassigned RNA
gacaagcagcaataagggaacagag

SEQ ID NO: 5932 - RNA, 25 nt, Homo sapiens
  source 1..25: mol_type = unassigned RNA
acaagcagcaataagggaacagagg

SEQ ID NO: 5933 - RNA, 25 nt, Homo sapiens
  source 1..25: mol_type = unassigned RNA
agcagcaataagggaacagaggggg

SEQ ID NO: 5934 - RNA, 25 nt, Homo sapiens
  source 1..25: mol_type = unassigned RNA
gaacagagggggtggcagcagtgtt

SEQ ID NO: 5935 - RNA, 25 nt, Homo sapiens
  source 1..25: mol_type = unassigned RNA
tcttcagcaatcttaatcataaatt

SEQ ID NO: 5936 - RNA, 25 nt, Homo sapiens
  source 1..25: mol_type = unassigned RNA
cttcagcaatcttaatcataaattc

SEQ ID NO: 5937 - RNA, 25 nt, Homo sapiens
  source 1..25: mol_type = unassigned RNA
agcaatcttaatcataaattcgggt

SEQ ID NO: 5938 - RNA, 25 nt, Homo sapiens
  source 1..25: mol_type = unassigned RNA
atcataaattcgggtaggatccagt

SEQ ID NO: 5939 - RNA, 25 nt, Homo sapiens
  source 1..25: mol_type = unassigned RNA
ataaattcgggtaggatccagttgg

SEQ ID NO: 5940 - RNA, 25 nt, Homo sapiens
  source 1..25: mol_type = unassigned RNA
ggtaggatccagttggtggcattgc

SEQ ID NO: 5941 - RNA, 25 nt, Homo sapiens
  source 1..25: mol_type = unassigned RNA
gtaggatccagttggtggcattgcc

SEQ ID NO: 5942 - RNA, 25 nt, Homo sapiens
  source 1..25: mol_type = unassigned RNA
taggatccagttggtggcattgccg

SEQ ID NO: 5943 - RNA, 25 nt, Homo sapiens
  source 1..25: mol_type = unassigned RNA
aggatccagttggtggcattgccgg

SEQ ID NO: 5944 - RNA, 25 nt, Homo sapiens
  source 1..25: mol_type = unassigned RNA
ggatccagttggtggcattgccggg

SEQ ID NO: 5945 - RNA, 25 nt, Homo sapiens
  source 1..25: mol_type = unassigned RNA
gatccagttggtggcattgccgggg

SEQ ID NO: 5946 - RNA, 25 nt, Homo sapiens
  source 1..25: mol_type = unassigned RNA
tggtggcattgccgggggggcacag

SEQ ID NO: 5947 - RNA, 25 nt, Homo sapiens
  source 1..25: mol_type = unassigned RNA
tggcattgccgggggggcacagagg

SEQ ID NO: 5948 - RNA, 25 nt, Homo sapiens
  source 1..25: mol_type = unassigned RNA
gaggtggtagcagctttcacctcct

SEQ ID NO: 5949 - RNA, 25 nt, Homo sapiens
  source 1..25: mol_type = unassigned RNA
aggtggtagcagctttcacctcctt

SEQ ID NO: 5950 - RNA, 25 nt, Homo sapiens
  source 1..25: mol_type = unassigned RNA
ggtggtagcagctttcacctccttg

SEQ ID NO: 5951 - RNA, 25 nt, Homo sapiens
  source 1..25: mol_type = unassigned RNA
gtggtagcagctttcacctccttgg

SEQ ID NO: 5952 - RNA, 25 nt, Homo sapiens
  source 1..25: mol_type = unassigned RNA
tagcagctttcacctccttgggggt

SEQ ID NO: 5953 - RNA, 25 nt, Homo sapiens
  source 1..25: mol_type = unassigned RNA
tgggggtaggagagttccctctgtt

SEQ ID NO: 5954 - RNA, 25 nt, Homo sapiens
  source 1..25: mol_type = unassigned RNA
gtaggagagttccctctgtttggag

SEQ ID NO: 5955 - RNA, 25 nt, Homo sapiens
  source 1..25: mol_type = unassigned RNA
taggagagttccctctgtttggaga

SEQ ID NO: 5956 - RNA, 25 nt, Homo sapiens
  source 1..25: mol_type = unassigned RNA
ttccctctgtttggagagggagaag

SEQ ID NO: 5957 - RNA, 25 nt, Homo sapiens
  source 1..25: mol_type = unassigned RNA
tccctctgtttggagagggagaaga

SEQ ID NO: 5958 - RNA, 25 nt, Homo sapiens
  source 1..25: mol_type = unassigned RNA
ccctctgtttggagagggagaagag

SEQ ID NO: 5959 - RNA, 25 nt, Homo sapiens
  source 1..25: mol_type = unassigned RNA
gagagggagaagaggggcaatgcag

SEQ ID NO: 5960 - RNA, 25 nt, Homo sapiens
  source 1..25: mol_type = unassigned RNA
gggagaagaggggcaatgcagagga

SEQ ID NO: 5961 - RNA, 25 nt, Homo sapiens
  source 1..25: mol_type = unassigned RNA
gaggggcaatgcagaggaaggagcg

SEQ ID NO: 5962 - RNA, 25 nt, Homo sapiens
  source 1..25: mol_type = unassigned RNA
aggggcaatgcagaggaaggagcga

SEQ ID NO: 5963 - RNA, 25 nt, Homo sapiens
  source 1..25: mol_type = unassigned RNA
tgcagaggaaggagcgagggagcac

SEQ ID NO: 5964 - RNA, 25 nt, Homo sapiens
  source 1..25: mol_type = unassigned RNA
aggctgtcttacaatcttgcagatc

SEQ ID NO: 5965 - RNA, 25 nt, Homo sapiens
  source 1..25: mol_type = unassigned RNA
cttacaatcttgcagatctggaatg

SEQ ID NO: 5966 - RNA, 25 nt, Homo sapiens
  source 1..25: mol_type = unassigned RNA
cttccctttccagaggacctgaaca

SEQ ID NO: 5967 - RNA, 25 nt, Homo sapiens
  source 1..25: mol_type = unassigned RNA
gacctgaacaaggtgttcccacccg

SEQ ID NO: 5968 - RNA, 25 nt, Homo sapiens
  source 1..25: mol_type = unassigned RNA
gaagcagagatctcccacacccaaa

SEQ ID NO: 5969 - RNA, 25 nt, Homo sapiens
  source 1..25: mol_type = unassigned RNA
atctcccacacccaaaaggccacac

SEQ ID NO: 5970 - RNA, 25 nt, Homo sapiens
  source 1..25: mol_type = unassigned RNA
acccaaaaggccacactggtgtgcc

SEQ ID NO: 5971 - RNA, 25 nt, Homo sapiens
  source 1..25: mol_type = unassigned RNA
aggccacactggtgtgcctggccac

SEQ ID NO: 5972 - RNA, 25 nt, Homo sapiens
  source 1..25: mol_type = unassigned RNA
gccacaggcttcttccccgaccacg

SEQ ID NO: 5973 - RNA, 25 nt, Homo sapiens
  source 1..25: mol_type = unassigned RNA
cttccccgaccacgtggagctgagc

SEQ ID NO: 5974 - RNA, 25 nt, Homo sapiens
  source 1..25: mol_type = unassigned RNA
ccccgaccacgtggagctgagctgg

SEQ ID NO: 5975 - RNA, 25 nt, Homo sapiens
  source 1..25: mol_type = unassigned RNA
cccgaccacgtggagctgagctggt

SEQ ID NO: 5976 - RNA, 25 nt, Homo sapiens
  source 1..25: mol_type = unassigned RNA
acgtggagctgagctggtgggtgaa

SEQ ID NO: 5977 - RNA, 25 nt, Homo sapiens
  source 1..25: mol_type = unassigned RNA
cgtggagctgagctggtgggtgaat

SEQ ID NO: 5978 - RNA, 25 nt, Homo sapiens
  source 1..25: mol_type = unassigned RNA
gagctgagctggtgggtgaatggga

SEQ ID NO: 5979 - RNA, 25 nt, Homo sapiens
  source 1..25: mol_type = unassigned RNA
ctgagctggtgggtgaatgggaagg

SEQ ID NO: 5980 - RNA, 25 nt, Homo sapiens
  source 1..25: mol_type = unassigned RNA
gggtgaatgggaaggaggtgcacag

SEQ ID NO: 5981 - RNA, 25 nt, Homo sapiens
  source 1..25: mol_type = unassigned RNA
ggtgaatgggaaggaggtgcacagt

SEQ ID NO: 5982 - RNA, 25 nt, Homo sapiens
  source 1..25: mol_type = unassigned RNA
gtgaatgggaaggaggtgcacagtg

SEQ ID NO: 5983 - RNA, 25 nt, Homo sapiens
  source 1..25: mol_type = unassigned RNA
gtcagcacagacccgcagcccctca

SEQ ID NO: 5984 - RNA, 25 nt, Homo sapiens
  source 1..25: mol_type = unassigned RNA
cagatactgcctgagcagccgcctg

SEQ ID NO: 5985 - RNA, 25 nt, Homo sapiens
  source 1..25: mol_type = unassigned RNA
agatactgcctgagcagccgcctga

SEQ ID NO: 5986 - RNA, 25 nt, Homo sapiens
  source 1..25: mol_type = unassigned RNA
tgcctgagcagccgcctgagggtct

SEQ ID NO: 5987 - RNA, 25 nt, Homo sapiens
  source 1..25: mol_type = unassigned RNA
ccgcctgagggtctcggccaccttc

SEQ ID NO: 5988 - RNA, 25 nt, Homo sapiens
  source 1..25: mol_type = unassigned RNA
acttccgctgtcaagtccagttcta

SEQ ID NO: 5989 - RNA, 25 nt, Homo sapiens
  source 1..25: mol_type = unassigned RNA
cttccgctgtcaagtccagttctac

SEQ ID NO: 5990 - RNA, 25 nt, Homo sapiens
  source 1..25: mol_type = unassigned RNA
tgtcaagtccagttctacgggctct

SEQ ID NO: 5991 - RNA, 25 nt, Homo sapiens
  source 1..25: mol_type = unassigned RNA
ctacgggctctcggagaatgacgag

SEQ ID NO: 5992 - RNA, 25 nt, Homo sapiens
  source 1..25: mol_type = unassigned RNA
ctctcggagaatgacgagtggaccc

SEQ ID NO: 5993 - RNA, 25 nt, Homo sapiens
  source 1..25: mol_type = unassigned RNA
ggagaatgacgagtggacccaggat

SEQ ID NO: 5994 - RNA, 25 nt, Homo sapiens
  source 1..25: mol_type = unassigned RNA
gagaatgacgagtggacccaggata

SEQ ID NO: 5995 - RNA, 25 nt, Homo sapiens
  source 1..25: mol_type = unassigned RNA
cccgtcacccagatcgtcagcgccg

SEQ ID NO: 5996 - RNA, 25 nt, Homo sapiens
  source 1..25: mol_type = unassigned RNA
cacccagatcgtcagcgccgaggcc

SEQ ID NO: 5997 - RNA, 25 nt, Homo sapiens
  source 1..25: mol_type = unassigned RNA
acccagatcgtcagcgccgaggcct

SEQ ID NO: 5998 - RNA, 25 nt, Homo sapiens
  source 1..25: mol_type = unassigned RNA
cccagatcgtcagcgccgaggcctg

SEQ ID NO: 5999 - RNA, 25 nt, Homo sapiens
  source 1..25: mol_type = unassigned RNA
tcagcgccgaggcctggggtagagc

SEQ ID NO: 6000 - RNA, 25 nt, Homo sapiens
  source 1..25: mol_type = unassigned RNA
cgaggcctggggtagagcaggtgag

SEQ ID NO: 6001 - RNA, 25 nt, Homo sapiens
  source 1..25: mol_type = unassigned RNA
gaggcctggggtagagcaggtgagt

SEQ ID NO: 6002 - RNA, 25 nt, Homo sapiens
  source 1..25: mol_type = unassigned RNA
aggcctggggtagagcaggtgagtg

SEQ ID NO: 6003 - RNA, 25 nt, Homo sapiens
  source 1..25: mol_type = unassigned RNA
tggggtagagcaggtgagtggggcc

SEQ ID NO: 6004 - RNA, 25 nt, Homo sapiens
  source 1..25: mol_type = unassigned RNA
ggggtagagcaggtgagtggggcct

SEQ ID NO: 6005 - RNA, 25 nt, Homo sapiens
  source 1..25: mol_type = unassigned RNA
gggtagagcaggtgagtggggcctg

SEQ ID NO: 6006 - RNA, 25 nt, Homo sapiens
  source 1..25: mol_type = unassigned RNA
aggccccactcacctgctctacccc

SEQ ID NO: 6007 - RNA, 25 nt, Homo sapiens
  source 1..25: mol_type = unassigned RNA
cactcacctgctctaccccaggcct

SEQ ID NO: 6008 - RNA, 25 nt, Homo sapiens
  source 1..25: mol_type = unassigned RNA
accccaggcctcggcgctgacgatc

SEQ ID NO: 6009 - RNA, 25 nt, Homo sapiens
  source 1..25: mol_type = unassigned RNA
ccccaggcctcggcgctgacgatct

SEQ ID NO: 6010 - RNA, 25 nt, Homo sapiens
  source 1..25: mol_type = unassigned RNA
gcctcggcgctgacgatctgggtga

SEQ ID NO: 6011 - RNA, 25 nt, Homo sapiens
  source 1..25: mol_type = unassigned RNA
cctcggcgctgacgatctgggtgac

SEQ ID NO: 6012 - RNA, 25 nt, Homo sapiens
  source 1..25: mol_type = unassigned RNA
gcgctgacgatctgggtgacgggtt

SEQ ID NO: 6013 - RNA, 25 nt, Homo sapiens
  source 1..25: mol_type = unassigned RNA
ctgggtgacgggtttggccctatcc

SEQ ID NO: 6014 - RNA, 25 nt, Homo sapiens
  source 1..25: mol_type = unassigned RNA
tgggtgacgggtttggccctatcct

SEQ ID NO: 6015 - RNA, 25 nt, Homo sapiens
  source 1..25: mol_type = unassigned RNA
gtcattctccgagagcccgtagaac

SEQ ID NO: 6016 - RNA, 25 nt, Homo sapiens
  source 1..25: mol_type = unassigned RNA
gagcccgtagaactggacttgacag

SEQ ID NO: 6017 - RNA, 25 nt, Homo sapiens
  source 1..25: mol_type = unassigned RNA
gtagaactggacttgacagcggaag

SEQ ID NO: 6018 - RNA, 25 nt, Homo sapiens
  source 1..25: mol_type = unassigned RNA
ctggacttgacagcggaagtggttg

SEQ ID NO: 6019 - RNA, 25 nt, Homo sapiens
  source 1..25: mol_type = unassigned RNA
tggacttgacagcggaagtggttgc

SEQ ID NO: 6020 - RNA, 25 nt, Homo sapiens
  source 1..25: mol_type = unassigned RNA
ggacttgacagcggaagtggttgcg

SEQ ID NO: 6021 - RNA, 25 nt, Homo sapiens
  source 1..25: mol_type = unassigned RNA
gacttgacagcggaagtggttgcgg

SEQ ID NO: 6022 - RNA, 25 nt, Homo sapiens
  source 1..25: mol_type = unassigned RNA
aagtggttgcgggggttctgccaga

SEQ ID NO: 6023 - RNA, 25 nt, Homo sapiens
  source 1..25: mol_type = unassigned RNA
tggttgcgggggttctgccagaagg

SEQ ID NO: 6024 - RNA, 25 nt, Homo sapiens
  source 1..25: mol_type = unassigned RNA
ctgccagaaggtggccgagaccctc

SEQ ID NO: 6025 - RNA, 25 nt, Homo sapiens
  source 1..25: mol_type = unassigned RNA
ccagaaggtggccgagaccctcagg

SEQ ID NO: 6026 - RNA, 25 nt, Homo sapiens
  source 1..25: mol_type = unassigned RNA
ggccgagaccctcaggcggctgctc

SEQ ID NO: 6027 - RNA, 25 nt, Homo sapiens
  source 1..25: mol_type = unassigned RNA
ctcaggcggctgctcaggcagtatc

SEQ ID NO: 6028 - RNA, 25 nt, Homo sapiens
  source 1..25: mol_type = unassigned RNA
gctcaggcagtatctggagtcattg

SEQ ID NO: 6029 - RNA, 25 nt, Homo sapiens
  source 1..25: mol_type = unassigned RNA
ctcaggcagtatctggagtcattga

SEQ ID NO: 6030 - RNA, 25 nt, Homo sapiens
  source 1..25: mol_type = unassigned RNA
aggcagtatctggagtcattgaggg

SEQ ID NO: 6031 - RNA, 25 nt, Homo sapiens
  source 1..25: mol_type = unassigned RNA
ggcagtatctggagtcattgagggc

SEQ ID NO: 6032 - RNA, 25 nt, Homo sapiens
  source 1..25: mol_type = unassigned RNA
gtcattgagggcgggctgctccttg

SEQ ID NO: 6033 - RNA, 25 nt, Homo sapiens
  source 1..25: mol_type = unassigned RNA
tcattgagggcgggctgctccttga

SEQ ID NO: 6034 - RNA, 25 nt, Homo sapiens
  source 1..25: mol_type = unassigned RNA
cattgagggcgggctgctccttgag

SEQ ID NO: 6035 - RNA, 25 nt, Homo sapiens
  source 1..25: mol_type = unassigned RNA
gggcgggctgctccttgaggggctg

SEQ ID NO: 6036 - RNA, 25 nt, Homo sapiens
  source 1..25: mol_type = unassigned RNA
ggcgggctgctccttgaggggctgc

SEQ ID NO: 6037 - RNA, 25 nt, Homo sapiens
  source 1..25: mol_type = unassigned RNA
attcacccaccagctcagctccacg

SEQ ID NO: 6038 - RNA, 25 nt, Homo sapiens
  source 1..25: mol_type = unassigned RNA
acccaccagctcagctccacgtggt

SEQ ID NO: 6039 - RNA, 25 nt, Homo sapiens
  source 1..25: mol_type = unassigned RNA
cccaccagctcagctccacgtggtc

SEQ ID NO: 6040 - RNA, 25 nt, Homo sapiens
  source 1..25: mol_type = unassigned RNA
ccaccagctcagctccacgtggtcg

SEQ ID NO: 6041 - RNA, 25 nt, Homo sapiens
  source 1..25: mol_type = unassigned RNA
tccacgtggtcggggaagaagcctg

SEQ ID NO: 6042 - RNA, 25 nt, Homo sapiens
  source 1..25: mol_type = unassigned RNA
gtggtcggggaagaagcctgtggcc

SEQ ID NO: 6043 - RNA, 25 nt, Homo sapiens
  source 1..25: mol_type = unassigned RNA
aagcctgtggccaggcacaccagtg

SEQ ID NO: 6044 - RNA, 25 nt, Homo sapiens
  source 1..25: mol_type = unassigned RNA
ggccaggcacaccagtgtggccttt

SEQ ID NO: 6045 - RNA, 25 nt, Homo sapiens
  source 1..25: mol_type = unassigned RNA
gccaggcacaccagtgtggcctttt

SEQ ID NO: 6046 - RNA, 25 nt, Homo sapiens
  source 1..25: mol_type = unassigned RNA
gcacaccagtgtggccttttgggtg

SEQ ID NO: 6047 - RNA, 25 nt, Homo sapiens
  source 1..25: mol_type = unassigned RNA
cacaccagtgtggccttttgggtgt

SEQ ID NO: 6048 - RNA, 25 nt, Homo sapiens
  source 1..25: mol_type = unassigned RNA
gggtgtgggagatctctgcttctga

SEQ ID NO: 6049 - RNA, 25 nt, Homo sapiens
  source 1..25: mol_type = unassigned RNA
tctgatggctcaaacacagcgacct

SEQ ID NO: 6050 - RNA, 25 nt, Homo sapiens
  source 1..25: mol_type = unassigned RNA
ctgatggctcaaacacagcgacctc

SEQ ID NO: 6051 - RNA, 25 nt, Homo sapiens
  source 1..25: mol_type = unassigned RNA
atggctcaaacacagcgacctcggg

SEQ ID NO: 6052 - RNA, 25 nt, Homo sapiens
  source 1..25: mol_type = unassigned RNA
tggctcaaacacagcgacctcgggt

SEQ ID NO: 6053 - RNA, 25 nt, Homo sapiens
  source 1..25: mol_type = unassigned RNA
gacctcgggtgggaacaccttgttc

SEQ ID NO: 6054 - RNA, 25 nt, Homo sapiens
  source 1..25: mol_type = unassigned RNA
gtgggaacaccttgttcaggtcctc

SEQ ID NO: 6055 - RNA, 25 nt, Homo sapiens
  source 1..25: mol_type = unassigned RNA
aacaccttgttcaggtcctctggaa

SEQ ID NO: 6056 - RNA, 25 nt, Homo sapiens
  source 1..25: mol_type = unassigned RNA
acaccttgttcaggtcctctggaaa

SEQ ID NO: 6057 - RNA, 25 nt, Homo sapiens
  source 1..25: mol_type = unassigned RNA
tgttcaggtcctctggaaagggaag

SEQ ID NO: 6058 - RNA, 25 nt, Homo sapiens
  source 1..25: mol_type = unassigned RNA
gttcaggtcctctggaaagggaaga

SEQ ID NO: 6059 - RNA, 25 nt, Homo sapiens
  source 1..25: mol_type = unassigned RNA
ttcaggtcctctggaaagggaagag

SEQ ID NO: 6060 - RNA, 25 nt, Homo sapiens
  source 1..25: mol_type = unassigned RNA
tttctttcagactgtggctttacct

SEQ ID NO: 6061 - RNA, 25 nt, Homo sapiens
  source 1..25: mol_type = unassigned RNA
ttctttcagactgtggctttacctc

SEQ ID NO: 6062 - RNA, 25 nt, Homo sapiens
  source 1..25: mol_type = unassigned RNA
gtaaagccacagtctgaaagaaagc

SEQ ID NO: 6063 - RNA, 25 nt, Homo sapiens
  source 1..25: mol_type = unassigned RNA
taaagccacagtctgaaagaaagca

SEQ ID NO: 6064 - RNA, 25 nt, Homo sapiens
  source 1..25: mol_type = unassigned RNA
ccgtgccaacagtgtcctaccagca

SEQ ID NO: 6065 - RNA, 25 nt, Homo sapiens
  source 1..25: mol_type = unassigned RNA
cgtgccaacagtgtcctaccagcaa

SEQ ID NO: 6066 - RNA, 25 nt, Homo sapiens
  source 1..25: mol_type = unassigned RNA
gtgccaacagtgtcctaccagcaag

SEQ ID NO: 6067 - RNA, 25 nt, Homo sapiens
  source 1..25: mol_type = unassigned RNA
ccaccatcctctatgagatcctgct

SEQ ID NO: 6068 - RNA, 25 nt, Homo sapiens
  source 1..25: mol_type = unassigned RNA
caccatcctctatgagatcctgcta

SEQ ID NO: 6069 - RNA, 25 nt, Homo sapiens
  source 1..25: mol_type = unassigned RNA
atcctctatgagatcctgctaggga

SEQ ID NO: 6070 - RNA, 25 nt, Homo sapiens
  source 1..25: mol_type = unassigned RNA
gggaaggccaccctgtatgctgtgc

SEQ ID NO: 6071 - RNA, 25 nt, Homo sapiens
  source 1..25: mol_type = unassigned RNA
gtgctggtcagcgcccttgtgttga

SEQ ID NO: 6072 - RNA, 25 nt, Homo sapiens
  source 1..25: mol_type = unassigned RNA
gtcagcgcccttgtgttgatggcca

SEQ ID NO: 6073 - RNA, 25 nt, Homo sapiens
  source 1..25: mol_type = unassigned RNA
ccttgtgttgatggccatggtaagc

SEQ ID NO: 6074 - RNA, 25 nt, Homo sapiens
  source 1..25: mol_type = unassigned RNA
tgtgttgatggccatggtaagcagg

SEQ ID NO: 6075 - RNA, 25 nt, Homo sapiens
  source 1..25: mol_type = unassigned RNA
gtgttgatggccatggtaagcagga

SEQ ID NO: 6076 - RNA, 25 nt, Homo sapiens
  source 1..25: mol_type = unassigned RNA
tgatggccatggtaagcaggagggc

SEQ ID NO: 6077 - RNA, 25 nt, Homo sapiens
  source 1..25: mol_type = unassigned RNA
ggccatggtaagcaggagggcagga

SEQ ID NO: 6078 - RNA, 25 nt, Homo sapiens
  source 1..25: mol_type = unassigned RNA
gccatggtaagcaggagggcaggat

SEQ ID NO: 6079 - RNA, 25 nt, Homo sapiens
  source 1..25: mol_type = unassigned RNA
ccatggtaagcaggagggcaggatg

SEQ ID NO: 6080 - RNA, 25 nt, Homo sapiens
  source 1..25: mol_type = unassigned RNA
ccccatcctgccctcctgcttacca

SEQ ID NO: 6081 - RNA, 25 nt, Homo sapiens
  source 1..25: mol_type = unassigned RNA
cctgcttaccatggccatcaacaca

SEQ ID NO: 6082 - RNA, 25 nt, Homo sapiens
  source 1..25: mol_type = unassigned RNA
ctgcttaccatggccatcaacacaa

SEQ ID NO: 6083 - RNA, 25 nt, Homo sapiens
  source 1..25: mol_type = unassigned RNA
aagggcgctgaccagcacagcatac

SEQ ID NO: 6084 - RNA, 25 nt, Homo sapiens
  source 1..25: mol_type = unassigned RNA
agggcgctgaccagcacagcataca

SEQ ID NO: 6085 - RNA, 25 nt, Homo sapiens
  source 1..25: mol_type = unassigned RNA
gcgctgaccagcacagcatacaggg

SEQ ID NO: 6086 - RNA, 25 nt, Homo sapiens
  source 1..25: mol_type = unassigned RNA
agcatacagggtggccttccctagc

SEQ ID NO: 6087 - RNA, 25 nt, Homo sapiens
  source 1..25: mol_type = unassigned RNA
ggccttccctagcaggatctcatag

SEQ ID NO: 6088 - RNA, 25 nt, Homo sapiens
  source 1..25: mol_type = unassigned RNA
ttccctagcaggatctcatagagga

SEQ ID NO: 6089 - RNA, 25 nt, Homo sapiens
  source 1..25: mol_type = unassigned RNA
cctagcaggatctcatagaggatgg

SEQ ID NO: 6090 - RNA, 25 nt, Homo sapiens
  source 1..25: mol_type = unassigned RNA
gatctcatagaggatggtggcagac

SEQ ID NO: 6091 - RNA, 25 nt, Homo sapiens
  source 1..25: mol_type = unassigned RNA
gatggtggcagacaggaccccttgc

SEQ ID NO: 6092 - RNA, 25 nt, Homo sapiens
  source 1..25: mol_type = unassigned RNA
gtggcagacaggaccccttgctggt

SEQ ID NO: 6093 - RNA, 25 nt, Homo sapiens
  source 1..25: mol_type = unassigned RNA
ggaccccttgctggtaggacactgt

SEQ ID NO: 6094 - RNA, 25 nt, Homo sapiens
  source 1..25: mol_type = unassigned RNA
ccttgctggtaggacactgttggca

SEQ ID NO: 6095 - RNA, 25 nt, Homo sapiens
  source 1..25: mol_type = unassigned RNA
tgctggtaggacactgttggcacgg

SEQ ID NO: 6096 - RNA, 25 nt, Homo sapiens
  source 1..25: mol_type = unassigned RNA
gcaggtcaagagaaaggatttctga

SEQ ID NO: 6097 - RNA, 25 nt, Homo sapiens
  source 1..25: mol_type = unassigned RNA
gagaaaggatttctgaaggcagccc

SEQ ID NO: 6098 - RNA, 25 nt, Homo sapiens
  source 1..25: mol_type = unassigned RNA
gacctgaaaaacgtgttcccacccg

SEQ ID NO: 6099 - RNA, 25 nt, Homo sapiens
  source 1..25: mol_type = unassigned RNA
gaagcagagatctcccacacccaaa

SEQ ID NO: 6100 - RNA, 25 nt, Homo sapiens
  source 1..25: mol_type = unassigned RNA
atctcccacacccaaaaggccacac

SEQ ID NO: 6101 - RNA, 25 nt, Homo sapiens
  source 1..25: mol_type = unassigned RNA
acccaaaaggccacactggtatgcc

SEQ ID NO: 6102 - RNA, 25 nt, Homo sapiens
  source 1..25: mol_type = unassigned RNA
aggccacactggtatgcctggccac

SEQ ID NO: 6103 - RNA, 25 nt, Homo sapiens
  source 1..25: mol_type = unassigned RNA
gccacaggcttctaccccgaccacg

SEQ ID NO: 6104 - RNA, 25 nt, Homo sapiens
  source 1..25: mol_type = unassigned RNA
ctaccccgaccacgtggagctgagc

SEQ ID NO: 6105 - RNA, 25 nt, Homo sapiens
  source 1..25: mol_type = unassigned RNA
ccccgaccacgtggagctgagctgg

SEQ ID NO: 6106 - RNA, 25 nt, Homo sapiens
  source 1..25: mol_type = unassigned RNA
cccgaccacgtggagctgagctggt

SEQ ID NO: 6107 - RNA, 25 nt, Homo sapiens
  source 1..25: mol_type = unassigned RNA
acgtggagctgagctggtgggtgaa

SEQ ID NO: 6108 - RNA, 25 nt, Homo sapiens
  source 1..25: mol_type = unassigned RNA
cgtggagctgagctggtgggtgaat

SEQ ID NO: 6109 - RNA, 25 nt, Homo sapiens
  source 1..25: mol_type = unassigned RNA
gagctgagctggtgggtgaatggga

SEQ ID NO: 6110 - RNA, 25 nt, Homo sapiens
  source 1..25: mol_type = unassigned RNA
ctgagctggtgggtgaatgggaagg

SEQ ID NO: 6111 - RNA, 25 nt, Homo sapiens
  source 1..25: mol_type = unassigned RNA
gggtgaatgggaaggaggtgcacag

SEQ ID NO: 6112 - RNA, 25 nt, Homo sapiens
  source 1..25: mol_type = unassigned RNA
ggtgaatgggaaggaggtgcacagt

SEQ ID NO: 6113 - RNA, 25 nt, Homo sapiens
  source 1..25: mol_type = unassigned RNA
gtgaatgggaaggaggtgcacagtg

SEQ ID NO: 6114 - RNA, 25 nt, Homo sapiens
  source 1..25: mol_type = unassigned RNA
gtcagcacagacccgcagcccctca

SEQ ID NO: 6115 - RNA, 25 nt, Homo sapiens
  source 1..25: mol_type = unassigned RNA
cagatactgcctgagcagccgcctg

SEQ ID NO: 6116 - RNA, 25 nt, Homo sapiens
  source 1..25: mol_type = unassigned RNA
agatactgcctgagcagccgcctga

SEQ ID NO: 6117 - RNA, 25 nt, Homo sapiens
  source 1..25: mol_type = unassigned RNA
tgcctgagcagccgcctgagggtct

SEQ ID NO: 6118 - RNA, 25 nt, Homo sapiens
  source 1..25: mol_type = unassigned RNA
ccgcctgagggtctcggccaccttc

SEQ ID NO: 6119 - RNA, 25 nt, Homo sapiens
  source 1..25: mol_type = unassigned RNA
acttccgctgtcaagtccagttcta

SEQ ID NO: 6120 - RNA, 25 nt, Homo sapiens
  source 1..25: mol_type = unassigned RNA
cttccgctgtcaagtccagttctac

SEQ ID NO: 6121 - RNA, 25 nt, Homo sapiens
  source 1..25: mol_type = unassigned RNA
tgtcaagtccagttctacgggctct

SEQ ID NO: 6122 - RNA, 25 nt, Homo sapiens
  source 1..25: mol_type = unassigned RNA
ctacgggctctcggagaatgacgag

SEQ ID NO: 6123 - RNA, 25 nt, Homo sapiens
  source 1..25: mol_type = unassigned RNA
ctctcggagaatgacgagtggaccc

SEQ ID NO: 6124 - RNA, 25 nt, Homo sapiens
  source 1..25: mol_type = unassigned RNA
ggagaatgacgagtggacccaggat

SEQ ID NO: 6125 - RNA, 25 nt, Homo sapiens
  source 1..25: mol_type = unassigned RNA
gagaatgacgagtggacccaggata

SEQ ID NO: 6126 - RNA, 25 nt, Homo sapiens
  source 1..25: mol_type = unassigned RNA
cccgtcacccagatcgtcagcgccg

SEQ ID NO: 6127 - RNA, 25 nt, Homo sapiens
  source 1..25: mol_type = unassigned RNA
cacccagatcgtcagcgccgaggcc

SEQ ID NO: 6128 - RNA, 25 nt, Homo sapiens
  source 1..25: mol_type = unassigned RNA
acccagatcgtcagcgccgaggcct

SEQ ID NO: 6129 - RNA, 25 nt, Homo sapiens
  source 1..25: mol_type = unassigned RNA
cccagatcgtcagcgccgaggcctg

SEQ ID NO: 6130 - RNA, 25 nt, Homo sapiens
  source 1..25: mol_type = unassigned RNA
tcagcgccgaggcctggggtagagc

SEQ ID NO: 6131 - RNA, 25 nt, Homo sapiens
  source 1..25: mol_type = unassigned RNA
cgaggcctggggtagagcaggtgag

SEQ ID NO: 6132 - RNA, 25 nt, Homo sapiens
  source 1..25: mol_type = unassigned RNA
gaggcctggggtagagcaggtgagt

SEQ ID NO: 6133 - RNA, 25 nt, Homo sapiens
  source 1..25: mol_type = unassigned RNA
aggcctggggtagagcaggtgagtg

SEQ ID NO: 6134 - RNA, 25 nt, Homo sapiens
  source 1..25: mol_type = unassigned RNA
tggggtagagcaggtgagtggggcc

SEQ ID NO: 6135 - RNA, 25 nt, Homo sapiens
  source 1..25: mol_type = unassigned RNA
ggggtagagcaggtgagtggggcct

SEQ ID NO: 6136 - RNA, 25 nt, Homo sapiens
  source 1..25: mol_type = unassigned RNA
gggtagagcaggtgagtggggcctg

SEQ ID NO: 6137 - RNA, 25 nt, Homo sapiens
  source 1..25: mol_type = unassigned RNA
aggccccactcacctgctctacccc

SEQ ID NO: 6138 - RNA, 25 nt, Homo sapiens
  source 1..25: mol_type = unassigned RNA
cactcacctgctctaccccaggcct

SEQ ID NO: 6139 - RNA, 25 nt, Homo sapiens
  source 1..25: mol_type = unassigned RNA
accccaggcctcggcgctgacgatc

SEQ ID NO: 6140 - RNA, 25 nt, Homo sapiens
  source 1..25: mol_type = unassigned RNA
ccccaggcctcggcgctgacgatct

SEQ ID NO: 6141 - RNA, 25 nt, Homo sapiens
  source 1..25: mol_type = unassigned RNA
gcctcggcgctgacgatctgggtga

SEQ ID NO: 6142 - RNA, 25 nt, Homo sapiens
  source 1..25: mol_type = unassigned RNA
cctcggcgctgacgatctgggtgac

SEQ ID NO: 6143 - RNA, 25 nt, Homo sapiens
  source 1..25: mol_type = unassigned RNA
gcgctgacgatctgggtgacgggtt

SEQ ID NO: 6144 - RNA, 25 nt, Homo sapiens
  source 1..25: mol_type = unassigned RNA
ctgggtgacgggtttggccctatcc

SEQ ID NO: 6145 - RNA, 25 nt, Homo sapiens
  source 1..25: mol_type = unassigned RNA
tgggtgacgggtttggccctatcct

SEQ ID NO: 6146 - RNA, 25 nt, Homo sapiens
  source 1..25: mol_type = unassigned RNA
gtcattctccgagagcccgtagaac

SEQ ID NO: 6147 - RNA, 25 nt, Homo sapiens
  source 1..25: mol_type = unassigned RNA
gagcccgtagaactggacttgacag

SEQ ID NO: 6148 - RNA, 25 nt, Homo sapiens
  source 1..25: mol_type = unassigned RNA
gtagaactggacttgacagcggaag

SEQ ID NO: 6149 - RNA, 25 nt, Homo sapiens
  source 1..25: mol_type = unassigned RNA
ctggacttgacagcggaagtggttg

SEQ ID NO: 6150 - RNA, 25 nt, Homo sapiens
  source 1..25: mol_type = unassigned RNA
tggacttgacagcggaagtggttgc

SEQ ID NO: 6151 - RNA, 25 nt, Homo sapiens
  source 1..25: mol_type = unassigned RNA
ggacttgacagcggaagtggttgcg

SEQ ID NO: 6152 - RNA, 25 nt, Homo sapiens
  source 1..25: mol_type = unassigned RNA
gacttgacagcggaagtggttgcgg

SEQ ID NO: 6153 - RNA, 25 nt, Homo sapiens
  source 1..25: mol_type = unassigned RNA
aagtggttgcgggggttctgccaga

SEQ ID NO: 6154 - RNA, 25 nt, Homo sapiens
  source 1..25: mol_type = unassigned RNA
tggttgcgggggttctgccagaagg

SEQ ID NO: 6155 - RNA, 25 nt, Homo sapiens
  source 1..25: mol_type = unassigned RNA
ctgccagaaggtggccgagaccctc

SEQ ID NO: 6156 - RNA, 25 nt, Homo sapiens
  source 1..25: mol_type = unassigned RNA
ccagaaggtggccgagaccctcagg

SEQ ID NO: 6157 - RNA, 25 nt, Homo sapiens
  source 1..25: mol_type = unassigned RNA
ggccgagaccctcaggcggctgctc

SEQ ID NO: 6158 - RNA, 25 nt, Homo sapiens
  source 1..25: mol_type = unassigned RNA
ctcaggcggctgctcaggcagtatc

SEQ ID NO: 6159 - RNA, 25 nt, Homo sapiens
  source 1..25: mol_type = unassigned RNA
gctcaggcagtatctggagtcattg

SEQ ID NO: 6160 - RNA, 25 nt, Homo sapiens
  source 1..25: mol_type = unassigned RNA
ctcaggcagtatctggagtcattga

SEQ ID NO: 6161 - RNA, 25 nt, Homo sapiens
  source 1..25: mol_type = unassigned RNA
aggcagtatctggagtcattgaggg

SEQ ID NO: 6162 - RNA, 25 nt, Homo sapiens
  source 1..25: mol_type = unassigned RNA
ggcagtatctggagtcattgagggc

SEQ ID NO: 6163 - RNA, 25 nt, Homo sapiens
  source 1..25: mol_type = unassigned RNA
gtcattgagggcgggctgctccttg

SEQ ID NO: 6164 - RNA, 25 nt, Homo sapiens
  source 1..25: mol_type = unassigned RNA
tcattgagggcgggctgctccttga

SEQ ID NO: 6165 - RNA, 25 nt, Homo sapiens
  source 1..25: mol_type = unassigned RNA
cattgagggcgggctgctccttgag

SEQ ID NO: 6166 - RNA, 25 nt, Homo sapiens
  source 1..25: mol_type = unassigned RNA
gggcgggctgctccttgaggggctg

SEQ ID NO: 6167 - RNA, 25 nt, Homo sapiens
  source 1..25: mol_type = unassigned RNA
ggcgggctgctccttgaggggctgc

SEQ ID NO: 6168 - RNA, 25 nt, Homo sapiens
  source 1..25: mol_type = unassigned RNA
attcacccaccagctcagctccacg

SEQ ID NO: 6169 - RNA, 25 nt, Homo sapiens
  source 1..25: mol_type = unassigned RNA
acccaccagctcagctccacgtggt

SEQ ID NO: 6170 - RNA, 25 nt, Homo sapiens
  source 1..25: mol_type = unassigned RNA
cccaccagctcagctccacgtggtc

SEQ ID NO: 6171 - RNA, 25 nt, Homo sapiens
  source 1..25: mol_type = unassigned RNA
ccaccagctcagctccacgtggtcg

SEQ ID NO: 6172 - RNA, 25 nt, Homo sapiens
  source 1..25: mol_type = unassigned RNA
tccacgtggtcggggtagaagcctg

SEQ ID NO: 6173 - RNA, 25 nt, Homo sapiens
  source 1..25: mol_type = unassigned RNA
gtggtcggggtagaagcctgtggcc

SEQ ID NO: 6174 - RNA, 25 nt, Homo sapiens
  source 1..25: mol_type = unassigned RNA
aagcctgtggccaggcataccagtg

SEQ ID NO: 6175 - RNA, 25 nt, Homo sapiens
  source 1..25: mol_type = unassigned RNA
ggccaggcataccagtgtggccttt

SEQ ID NO: 6176 - RNA, 25 nt, Homo sapiens
  source 1..25: mol_type = unassigned RNA
gccaggcataccagtgtggcctttt

SEQ ID NO: 6177 - RNA, 25 nt, Homo sapiens
  source 1..25: mol_type = unassigned RNA
gcataccagtgtggccttttgggtg

SEQ ID NO: 6178 - RNA, 25 nt, Homo sapiens
  source 1..25: mol_type = unassigned RNA
cataccagtgtggccttttgggtgt

SEQ ID NO: 6179 - RNA, 25 nt, Homo sapiens
  source 1..25: mol_type = unassigned RNA
gggtgtgggagatctctgcttctga

SEQ ID NO: 6180 - RNA, 25 nt, Homo sapiens
  source 1..25: mol_type = unassigned RNA
tctgatggctcaaacacagcgacct

SEQ ID NO: 6181 - RNA, 25 nt, Homo sapiens
  source 1..25: mol_type = unassigned RNA
ctgatggctcaaacacagcgacctc

SEQ ID NO: 6182 - RNA, 25 nt, Homo sapiens
  source 1..25: mol_type = unassigned RNA
atggctcaaacacagcgacctcggg

SEQ ID NO: 6183 - RNA, 25 nt, Homo sapiens
  source 1..25: mol_type = unassigned RNA
tggctcaaacacagcgacctcgggt

SEQ ID NO: 6184 - RNA, 25 nt, Homo sapiens
  source 1..25: mol_type = unassigned RNA
gacctcgggtgggaacacgtttttc

SEQ ID NO: 6185 - RNA, 25 nt, Homo sapiens
  source 1..25: mol_type = unassigned RNA
gtgggaacacgtttttcaggtcctc

SEQ ID NO: 6186 - RNA, 25 nt, Homo sapiens
  source 1..25: mol_type = unassigned RNA
aacacgtttttcaggtcctctggaa

SEQ ID NO: 6187 - RNA, 25 nt, Homo sapiens
  source 1..25: mol_type = unassigned RNA
acacgtttttcaggtcctctggaaa

SEQ ID NO: 6188 - RNA, 25 nt, Homo sapiens
  source 1..25: mol_type = unassigned RNA
ttttcaggtcctctggaaagggaag

SEQ ID NO: 6189 - RNA, 25 nt, Homo sapiens
  source 1..25: mol_type = unassigned RNA
ggtcctctggaaagggaagaggtaa

SEQ ID NO: 6190 - RNA, 25 nt, Homo sapiens
  source 1..25: mol_type = unassigned RNA
gtcctctggaaagggaagaggtaat

SEQ ID NO: 6191 - RNA, 25 nt, Homo sapiens
  source 1..25: mol_type = unassigned RNA
tcctctggaaagggaagaggtaatg

SEQ ID NO: 6192 - RNA, 25 nt, Homo sapiens
  source 1..25: mol_type = unassigned RNA
ttctttcagactgtggcttcacctc

SEQ ID NO: 6193 - RNA, 25 nt, Homo sapiens
  source 1..25: mol_type = unassigned RNA
gtgaagccacagtctgaaagaaaac

SEQ ID NO: 6194 - RNA, 25 nt, Homo sapiens
  source 1..25: mol_type = unassigned RNA
tgaagccacagtctgaaagaaaaca

SEQ ID NO: 6195 - RNA, 25 nt, Homo sapiens
  source 1..25: mol_type = unassigned RNA
gaagccacagtctgaaagaaaacag

SEQ ID NO: 6196 - RNA, 25 nt, Homo sapiens
  source 1..25: mol_type = unassigned RNA
tcttgtcaacagagtcttaccagca

SEQ ID NO: 6197 - RNA, 25 nt, Homo sapiens
  source 1..25: mol_type = unassigned RNA
cttgtcaacagagtcttaccagcaa

SEQ ID NO: 6198 - RNA, 25 nt, Homo sapiens
  source 1..25: mol_type = unassigned RNA
ttgtcaacagagtcttaccagcaag

SEQ ID NO: 6199 - RNA, 25 nt, Homo sapiens
  source 1..25: mol_type = unassigned RNA
ccaccatcctctatgagatcttgct

SEQ ID NO: 6200 - RNA, 25 nt, Homo sapiens
  source 1..25: mol_type = unassigned RNA
caccatcctctatgagatcttgcta

SEQ ID NO: 6201 - RNA, 25 nt, Homo sapiens
  source 1..25: mol_type = unassigned RNA
atcctctatgagatcttgctaggga

SEQ ID NO: 6202 - RNA, 25 nt, Homo sapiens
  source 1..25: mol_type = unassigned RNA
gggaaggccaccttgtatgccgtgc

SEQ ID NO: 6203 - RNA, 25 nt, Homo sapiens
  source 1..25: mol_type = unassigned RNA
gtgctggtcagtgccctcgtgctga

SEQ ID NO: 6204 - RNA, 25 nt, Homo sapiens
  source 1..25: mol_type = unassigned RNA
gtcagtgccctcgtgctgatggcca

SEQ ID NO: 6205 - RNA, 25 nt, Homo sapiens
  source 1..25: mol_type = unassigned RNA
tgccctcgtgctgatggccatggta

SEQ ID NO: 6206 - RNA, 25 nt, Homo sapiens
  source 1..25: mol_type = unassigned RNA
cctcgtgctgatggccatggtaagg

SEQ ID NO: 6207 - RNA, 25 nt, Homo sapiens
  source 1..25: mol_type = unassigned RNA
cgtgctgatggccatggtaaggagg

SEQ ID NO: 6208 - RNA, 25 nt, Homo sapiens
  source 1..25: mol_type = unassigned RNA
gtgctgatggccatggtaaggagga

SEQ ID NO: 6209 - RNA, 25 nt, Homo sapiens
  source 1..25: mol_type = unassigned RNA
ctgatggccatggtaaggaggaggg

SEQ ID NO: 6210 - RNA, 25 nt, Homo sapiens
  source 1..25: mol_type = unassigned RNA
tgatggccatggtaaggaggagggt

SEQ ID NO: 6211 - RNA, 25 nt, Homo sapiens
  source 1..25: mol_type = unassigned RNA
gccatggtaaggaggagggtgggat

SEQ ID NO: 6212 - RNA, 25 nt, Homo sapiens
  source 1..25: mol_type = unassigned RNA
ccatggtaaggaggagggtgggata

SEQ ID NO: 6213 - RNA, 25 nt, Homo sapiens
  source 1..25: mol_type = unassigned RNA
ccctatcccaccctcctccttacca

SEQ ID NO: 6214 - RNA, 25 nt, Homo sapiens
  source 1..25: mol_type = unassigned RNA
cctccttaccatggccatcagcacg

SEQ ID NO: 6215 - RNA, 25 nt, Homo sapiens
  source 1..25: mol_type = unassigned RNA
ctccttaccatggccatcagcacga

SEQ ID NO: 6216 - RNA, 25 nt, Homo sapiens
  source 1..25: mol_type = unassigned RNA
atcagcacgagggcactgaccagca

SEQ ID NO: 6217 - RNA, 25 nt, Homo sapiens
  source 1..25: mol_type = unassigned RNA
agggcactgaccagcacggcataca

SEQ ID NO: 6218 - RNA, 25 nt, Homo sapiens
  source 1..25: mol_type = unassigned RNA
gcactgaccagcacggcatacaagg

SEQ ID NO: 6219 - RNA, 25 nt, Homo sapiens
  source 1..25: mol_type = unassigned RNA
ggccttccctagcaagatctcatag

SEQ ID NO: 6220 - RNA, 25 nt, Homo sapiens
  source 1..25: mol_type = unassigned RNA
ttccctagcaagatctcatagagga

SEQ ID NO: 6221 - RNA, 25 nt, Homo sapiens
  source 1..25: mol_type = unassigned RNA
cctagcaagatctcatagaggatgg

SEQ ID NO: 6222 - RNA, 25 nt, Homo sapiens
  source 1..25: mol_type = unassigned RNA
gatctcatagaggatggtggcagac

SEQ ID NO: 6223 - RNA, 25 nt, Homo sapiens
  source 1..25: mol_type = unassigned RNA
gatggtggcagacaggaccccttgc

SEQ ID NO: 6224 - RNA, 25 nt, Homo sapiens
  source 1..25: mol_type = unassigned RNA
ttctctcttccacaggtcaagagaa

SEQ ID NO: 6225 - RNA, 25 nt, Homo sapiens
  source 1..25: mol_type = unassigned RNA
cacaggtcaagagaaaggattccag

SEQ ID NO: 6226 - RNA, 25 nt, Homo sapiens
  source 1..25: mol_type = unassigned RNA
ctctggaatcctttctcttgacctg

SEQ ID NO: 6227 - RNA, 25 nt, Homo sapiens
  source 1..25: mol_type = unassigned RNA
ttcctcctactcaccatcagcctcc

SEQ ID NO: 6228 - RNA, 25 nt, Homo sapiens
  source 1..25: mol_type = unassigned RNA
ctactcaccatcagcctcctggtta

SEQ ID NO: 6229 - RNA, 25 nt, Homo sapiens
  source 1..25: mol_type = unassigned RNA
accatcagcctcctggttatggtac

SEQ ID NO: 6230 - RNA, 25 nt, Homo sapiens
  source 1..25: mol_type = unassigned RNA
ttatggtacaggtaagagcaacgcc

SEQ ID NO: 6231 - RNA, 25 nt, Homo sapiens
  source 1..25: mol_type = unassigned RNA
cgttgctcttacctgtaccataacc

SEQ ID NO: 6232 - RNA, 25 nt, Homo sapiens
  source 1..25: mol_type = unassigned RNA
tgctcttacctgtaccataaccagg

SEQ ID NO: 6233 - RNA, 25 nt, Homo sapiens
  source 1..25: mol_type = unassigned RNA
acctgtaccataaccaggaggctga

SEQ ID NO: 6234 - RNA, 25 nt, Homo sapiens
  source 1..25: mol_type = unassigned RNA
cataaccaggaggctgatggtgagt

SEQ ID NO: 6235 - RNA, 25 nt, Homo sapiens
  source 1..25: mol_type = unassigned RNA
aaccaggaggctgatggtgagtagg

SEQ ID NO: 6236 - RNA, 25 nt, Homo sapiens
  source 1..25: mol_type = unassigned RNA
gaggctgatggtgagtaggaggaag

SEQ ID NO: 6237 - RNA, 25 nt, Homo sapiens
  source 1..25: mol_type = unassigned RNA
aggaggaagaggaagcgcttcattt

SEQ ID NO: 6238 - RNA, 25 nt, Homo sapiens
  source 1..25: mol_type = unassigned RNA
ggaagaggaagcgcttcattttggt

SEQ ID NO: 6239 - RNA, 25 nt, Homo sapiens
  source 1..25: mol_type = unassigned RNA
gcgcttcattttggtaggatcttcg

SEQ ID NO: 6240 - RNA, 25 nt, Homo sapiens
  source 1..25: mol_type = unassigned RNA
tttggtaggatcttcgtggctgtct

SEQ ID NO: 6241 - RNA, 25 nt, Homo sapiens
  source 1..25: mol_type = unassigned RNA
gtggctgtcttggtagcagcttttt

SEQ ID NO: 6242 - RNA, 25 nt, Homo sapiens
  source 1..25: mol_type = unassigned RNA
tggtagcagctttttaggtgatctc

SEQ ID NO: 6243 - RNA, 25 nt, Homo sapiens
  source 1..25: mol_type = unassigned RNA
ggtagcagctttttaggtgatctca

SEQ ID NO: 6244 - RNA, 25 nt, Homo sapiens
  source 1..25: mol_type = unassigned RNA
ctttttaggtgatctcagggctgtc

SEQ ID NO: 6245 - RNA, 25 nt, Homo sapiens
  source 1..25: mol_type = unassigned RNA
tttaggtgatctcagggctgtctgg

SEQ ID NO: 6246 - RNA, 25 nt, Homo sapiens
  source 1..25: mol_type = unassigned RNA
ctcagggctgtctggaggcttcttt

SEQ ID NO: 6247 - RNA, 25 nt, Homo sapiens
  source 1..25: mol_type = unassigned RNA
cttttggtttagctgcttttgaacc

SEQ ID NO: 6248 - RNA, 25 nt, Homo sapiens
  source 1..25: mol_type = unassigned RNA
ttggtttagctgcttttgaaccagg

SEQ ID NO: 6249 - RNA, 25 nt, Homo sapiens
  source 1..25: mol_type = unassigned RNA
tagctgcttttgaaccaggaggcag

SEQ ID NO: 6250 - RNA, 25 nt, Homo sapiens
  source 1..25: mol_type = unassigned RNA
ctgcttttgaaccaggaggcagagg

SEQ ID NO: 6251 - RNA, 25 nt, Homo sapiens
  source 1..25: mol_type = unassigned RNA
cttttgaaccaggaggcagaggagg

SEQ ID NO: 6252 - RNA, 25 nt, Homo sapiens
  source 1..25: mol_type = unassigned RNA
cacttctcctcctacagatacaaac

SEQ ID NO: 6253 - RNA, 25 nt, Homo sapiens
  source 1..25: mol_type = unassigned RNA
tcctacagatacaaactggactctc

SEQ ID NO: 6254 - RNA, 25 nt, Homo sapiens
  source 1..25: mol_type = unassigned RNA
gcccctcagcatccagcaacataag

SEQ ID NO: 6255 - RNA, 25 nt, Homo sapiens
  source 1..25: mol_type = unassigned RNA
cctcagcatccagcaacataagcgg

SEQ ID NO: 6256 - RNA, 25 nt, Homo sapiens
  source 1..25: mol_type = unassigned RNA
agcggaggcattttccttttcttcg

SEQ ID NO: 6257 - RNA, 25 nt, Homo sapiens
  source 1..25: mol_type = unassigned RNA
taatccacctcttctgcttcagttg

SEQ ID NO: 6258 - RNA, 25 nt, Homo sapiens
  source 1..25: mol_type = unassigned RNA
ctcgcaagagaatcccctccatctt

SEQ ID NO: 6259 - RNA, 25 nt, Homo sapiens
  source 1..25: mol_type = unassigned RNA
tcgcaagagaatcccctccatcttt

SEQ ID NO: 6260 - RNA, 25 nt, Homo sapiens
  source 1..25: mol_type = unassigned RNA
caagagaatcccctccatctttggg

SEQ ID NO: 6261 - RNA, 25 nt, Homo sapiens
  source 1..25: mol_type = unassigned RNA
aagagaatcccctccatctttggga

SEQ ID NO: 6262 - RNA, 25 nt, Homo sapiens
  source 1..25: mol_type = unassigned RNA
agagaatcccctccatctttgggag

SEQ ID NO: 6263 - RNA, 25 nt, Homo sapiens
  source 1..25: mol_type = unassigned RNA
ggaggggttgatgccagacatcacc

SEQ ID NO: 6264 - RNA, 25 nt, Homo sapiens
  source 1..25: mol_type = unassigned RNA
acatcaccaggttgtagaagttgac

SEQ ID NO: 6265 - RNA, 25 nt, Homo sapiens
  source 1..25: mol_type = unassigned RNA
ttgtagaagttgacaggcagtgcca

SEQ ID NO: 6266 - RNA, 25 nt, Homo sapiens
  source 1..25: mol_type = unassigned RNA
tgtagaagttgacaggcagtgccat

SEQ ID NO: 6267 - RNA, 25 nt, Homo sapiens
  source 1..25: mol_type = unassigned RNA
gtagaagttgacaggcagtgccatg

SEQ ID NO: 6268 - RNA, 25 nt, Homo sapiens
  source 1..25: mol_type = unassigned RNA
tagaagttgacaggcagtgccatgg

SEQ ID NO: 6269 - RNA, 25 nt, Homo sapiens
  source 1..25: mol_type = unassigned RNA
gtgccatgggggcaacagccaaaat

SEQ ID NO: 6270 - RNA, 25 nt, Homo sapiens
  source 1..25: mol_type = unassigned RNA
tgccatgggggcaacagccaaaata

SEQ ID NO: 6271 - RNA, 25 nt, Homo sapiens
  source 1..25: mol_type = unassigned RNA
gccatgggggcaacagccaaaatag

SEQ ID NO: 6272 - RNA, 25 nt, Homo sapiens
  source 1..25: mol_type = unassigned RNA
ccatgggggcaacagccaaaatagg

SEQ ID NO: 6273 - RNA, 25 nt, Homo sapiens
  source 1..25: mol_type = unassigned RNA
catgggggcaacagccaaaataggg

SEQ ID NO: 6274 - RNA, 25 nt, Homo sapiens
  source 1..25: mol_type = unassigned RNA
agccaaaataggggggtaatgatgt

SEQ ID NO: 6275 - RNA, 25 nt, Homo sapiens
  source 1..25: mol_type = unassigned RNA
gccaaaataggggggtaatgatgta

SEQ ID NO: 6276 - RNA, 25 nt, Homo sapiens
  source 1..25: mol_type = unassigned RNA
ccaaaataggggggtaatgatgtag

SEQ ID NO: 6277 - RNA, 25 nt, Homo sapiens
  source 1..25: mol_type = unassigned RNA
atgtaggggccaagcagtgcccagc

SEQ ID NO: 6278 - RNA, 25 nt, Homo sapiens
  source 1..25: mol_type = unassigned RNA
tgtaggggccaagcagtgcccagct

SEQ ID NO: 6279 - RNA, 25 nt, Homo sapiens
  source 1..25: mol_type = unassigned RNA
gtaggggccaagcagtgcccagctg

SEQ ID NO: 6280 - RNA, 25 nt, Homo sapiens
  source 1..25: mol_type = unassigned RNA
taggggccaagcagtgcccagctgg

SEQ ID NO: 6281 - RNA, 25 nt, Homo sapiens
  source 1..25: mol_type = unassigned RNA
aataaagttacccttgtacttgcag

SEQ ID NO: 6282 - RNA, 25 nt, Homo sapiens
  source 1..25: mol_type = unassigned RNA
ataaagttacccttgtacttgcagt

SEQ ID NO: 6283 - RNA, 25 nt, Homo sapiens
  source 1..25: mol_type = unassigned RNA
taaagttacccttgtacttgcagtg

SEQ ID NO: 6284 - RNA, 25 nt, Homo sapiens
  source 1..25: mol_type = unassigned RNA
tgtacttgcagtggggtcctgcttg

SEQ ID NO: 6285 - RNA, 25 nt, Homo sapiens
  source 1..25: mol_type = unassigned RNA
gcagtggggtcctgcttgtggttac

SEQ ID NO: 6286 - RNA, 25 nt, Homo sapiens
  source 1..25: mol_type = unassigned RNA
gtagggatgtccagtaaccacaagc

SEQ ID NO: 6287 - RNA, 25 nt, Homo sapiens
  source 1..25: mol_type = unassigned RNA
caagcaggaccccactgcaagtaca

SEQ ID NO: 6288 - RNA, 25 nt, Homo sapiens
  source 1..25: mol_type = unassigned RNA
aagcaggaccccactgcaagtacaa

SEQ ID NO: 6289 - RNA, 25 nt, Homo sapiens
  source 1..25: mol_type = unassigned RNA
aagggtaactttattgacccccagc

SEQ ID NO: 6290 - RNA, 25 nt, Homo sapiens
  source 1..25: mol_type = unassigned RNA
agggtaactttattgacccccagct

SEQ ID NO: 6291 - RNA, 25 nt, Homo sapiens
  source 1..25: mol_type = unassigned RNA
tattgacccccagctgggcactgct

SEQ ID NO: 6292 - RNA, 25 nt, Homo sapiens
  source 1..25: mol_type = unassigned RNA
cccctacatcattacccccctattt

SEQ ID NO: 6293 - RNA, 25 nt, Homo sapiens
  source 1..25: mol_type = unassigned RNA
ccccctattttggctgttgccccca

SEQ ID NO: 6294 - RNA, 25 nt, Homo sapiens
  source 1..25: mol_type = unassigned RNA
gcactgcctgtcaacttctacaacc

SEQ ID NO: 6295 - RNA, 25 nt, Homo sapiens
  source 1..25: mol_type = unassigned RNA
tcaacttctacaacctggtgatgtc

SEQ ID NO: 6296 - RNA, 25 nt, Homo sapiens
  source 1..25: mol_type = unassigned RNA
gtctggcatcaacccctcccaaaga

SEQ ID NO: 6297 - RNA, 25 nt, Homo sapiens
  source 1..25: mol_type = unassigned RNA
tggcatcaacccctcccaaagatgg

SEQ ID NO: 6298 - RNA, 25 nt, Homo sapiens
  source 1..25: mol_type = unassigned RNA
ggcatcaacccctcccaaagatgga

SEQ ID NO: 6299 - RNA, 25 nt, Homo sapiens
  source 1..25: mol_type = unassigned RNA
gcatcaacccctcccaaagatggag

SEQ ID NO: 6300 - RNA, 25 nt, Homo sapiens
  source 1..25: mol_type = unassigned RNA
atggaggggattctcttgcgagtga

SEQ ID NO: 6301 - RNA, 25 nt, Homo sapiens
  source 1..25: mol_type = unassigned RNA
gaggggattctcttgcgagtgatgg

SEQ ID NO: 6302 - RNA, 25 nt, Homo sapiens
  source 1..25: mol_type = unassigned RNA
tgcgagtgatggtggcagctgtttc

SEQ ID NO: 6303 - RNA, 25 nt, Homo sapiens
  source 1..25: mol_type = unassigned RNA
gcgagtgatggtggcagctgtttca

SEQ ID NO: 6304 - RNA, 25 nt, Homo sapiens
  source 1..25: mol_type = unassigned RNA
cgagtgatggtggcagctgtttcag

SEQ ID NO: 6305 - RNA, 25 nt, Homo sapiens
  source 1..25: mol_type = unassigned RNA
gagtgatggtggcagctgtttcagg

SEQ ID NO: 6306 - RNA, 25 nt, Homo sapiens
  source 1..25: mol_type = unassigned RNA
tggtggcagctgtttcagggggcac

SEQ ID NO: 6307 - RNA, 25 nt, Homo sapiens
  source 1..25: mol_type = unassigned RNA
ggtggcagctgtttcagggggcaca

SEQ ID NO: 6308 - RNA, 25 nt, Homo sapiens
  source 1..25: mol_type = unassigned RNA
agctgtttcagggggcacagggcta

SEQ ID NO: 6309 - RNA, 25 nt, Homo sapiens
  source 1..25: mol_type = unassigned RNA
cgtgtcacctcaactgaagcagaag

SEQ ID NO: 6310 - RNA, 25 nt, Homo sapiens
  source 1..25: mol_type = unassigned RNA
gtcacctcaactgaagcagaagagg

SEQ ID NO: 6311 - RNA, 25 nt, Homo sapiens
  source 1..25: mol_type = unassigned RNA
caactgaagcagaagaggtggatta

SEQ ID NO: 6312 - RNA, 25 nt, Homo sapiens
  source 1..25: mol_type = unassigned RNA
aagcagaagaggtggattatggcat

SEQ ID NO: 6313 - RNA, 25 nt, Homo sapiens
  source 1..25: mol_type = unassigned RNA
gattatggcattggccacgaagaaa

SEQ ID NO: 6314 - RNA, 25 nt, Homo sapiens
  source 1..25: mol_type = unassigned RNA
aggaaaatgcctccgcttatgttgc

SEQ ID NO: 6315 - RNA, 25 nt, Homo sapiens
  source 1..25: mol_type = unassigned RNA
cctccgcttatgttgctggatgctg

SEQ ID NO: 6316 - RNA, 25 nt, Homo sapiens
  source 1..25: mol_type = unassigned RNA
ctccgcttatgttgctggatgctga

SEQ ID NO: 6317 - RNA, 25 nt, Homo sapiens
  source 1..25: mol_type = unassigned RNA
tccgcttatgttgctggatgctgag

SEQ ID NO: 6318 - RNA, 25 nt, Homo sapiens
  source 1..25: mol_type = unassigned RNA
atgttgctggatgctgaggggctgc

SEQ ID NO: 6319 - RNA, 25 nt, Homo sapiens
  source 1..25: mol_type = unassigned RNA
gctggatgctgaggggctgctggtt

SEQ ID NO: 6320 - RNA, 25 nt, Homo sapiens
  source 1..25: mol_type = unassigned RNA
gatgctgaggggctgctggtttggc

SEQ ID NO: 6321 - RNA, 25 nt, Homo sapiens
  source 1..25: mol_type = unassigned RNA
tcctgagagtccagtttgtatctgt

SEQ ID NO: 6322 - RNA, 25 nt, Homo sapiens
  source 1..25: mol_type = unassigned RNA
tgagagtccagtttgtatctgtagg

SEQ ID NO: 6323 - RNA, 25 nt, Homo sapiens
  source 1..25: mol_type = unassigned RNA
cagtttgtatctgtaggaggagaag

SEQ ID NO: 6324 - RNA, 25 nt, Homo sapiens
  source 1..25: mol_type = unassigned RNA
agtttgtatctgtaggaggagaagt

SEQ ID NO: 6325 - RNA, 25 nt, Homo sapiens
  source 1..25: mol_type = unassigned RNA
cgcgcgccgtgtggggcgcgcacgc

SEQ ID NO: 6326 - RNA, 25 nt, Homo sapiens
  source 1..25: mol_type = unassigned RNA
gcgcgccgtgtggggcgcgcacgca

SEQ ID NO: 6327 - RNA, 25 nt, Homo sapiens
  source 1..25: mol_type = unassigned RNA
gccgtgtggggcgcgcacgcagggc

SEQ ID NO: 6328 - RNA, 25 nt, Homo sapiens
  source 1..25: mol_type = unassigned RNA
ccgtgtggggcgcgcacgcagggct

SEQ ID NO: 6329 - RNA, 25 nt, Homo sapiens
  source 1..25: mol_type = unassigned RNA
gggcgcgcacgcagggctgggcgtg

SEQ ID NO: 6330 - RNA, 25 nt, Homo sapiens
  source 1..25: mol_type = unassigned RNA
ggcgcgcacgcagggctgggcgtga

SEQ ID NO: 6331 - RNA, 25 nt, Homo sapiens
  source 1..25: mol_type = unassigned RNA
gcgcgcacgcagggctgggcgtgag

SEQ ID NO: 6332 - RNA, 25 nt, Homo sapiens
  source 1..25: mol_type = unassigned RNA
cgcgcacgcagggctgggcgtgagg

SEQ ID NO: 6333 - RNA, 25 nt, Homo sapiens
  source 1..25: mol_type = unassigned RNA
ggcgtgagggggcgtgcgcgtgcgc

SEQ ID NO: 6334 - RNA, 25 nt, Homo sapiens
  source 1..25: mol_type = unassigned RNA
gtgcgcgtgcgcaggcgacgcgccg

SEQ ID NO: 6335 - RNA, 25 nt, Homo sapiens
  source 1..25: mol_type = unassigned RNA
tgcgcaggcgacgcgccgaggtact

SEQ ID NO: 6336 - RNA, 25 nt, Homo sapiens
  source 1..25: mol_type = unassigned RNA
cgcgccgaggtactaggcagagccg

SEQ ID NO: 6337 - RNA, 25 nt, Homo sapiens
  source 1..25: mol_type = unassigned RNA
taggcagagccgtggaaccgccgcc

SEQ ID NO: 6338 - RNA, 25 nt, Homo sapiens
  source 1..25: mol_type = unassigned RNA
cgtggaaccgccgccaggtcgctgt

SEQ ID NO: 6339 - RNA, 25 nt, Homo sapiens
  source 1..25: mol_type = unassigned RNA
gcccgctcagcgtccgccgccgcca

SEQ ID NO: 6340 - RNA, 25 nt, Homo sapiens
  source 1..25: mol_type = unassigned RNA
cccgctcagcgtccgccgccgccat

SEQ ID NO: 6341 - RNA, 25 nt, Homo sapiens
  source 1..25: mol_type = unassigned RNA
gcgtccgccgccgccatgggagtgc

SEQ ID NO: 6342 - RNA, 25 nt, Homo sapiens
  source 1..25: mol_type = unassigned RNA
tccgccgccgccatgggagtgcagg

SEQ ID NO: 6343 - RNA, 25 nt, Homo sapiens
  source 1..25: mol_type = unassigned RNA
gagtgcaggtggaaaccatctcccc

SEQ ID NO: 6344 - RNA, 25 nt, Homo sapiens
  source 1..25: mol_type = unassigned RNA
aggtggaaaccatctccccaggaga

SEQ ID NO: 6345 - RNA, 25 nt, Homo sapiens
  source 1..25: mol_type = unassigned RNA
catctccccaggagacggtgagtag

SEQ ID NO: 6346 - RNA, 25 nt, Homo sapiens
  source 1..25: mol_type = unassigned RNA
ccaggagacggtgagtagtggcgcg

SEQ ID NO: 6347 - RNA, 25 nt, Homo sapiens
  source 1..25: mol_type = unassigned RNA
ggagacggtgagtagtggcgcgcgg

SEQ ID NO: 6348 - RNA, 25 nt, Homo sapiens
  source 1..25: mol_type = unassigned RNA
ccgcgcgccactactcaccgtctcc

SEQ ID NO: 6349 - RNA, 25 nt, Homo sapiens
  source 1..25: mol_type = unassigned RNA
cgcgcgccactactcaccgtctcct

SEQ ID NO: 6350 - RNA, 25 nt, Homo sapiens
  source 1..25: mol_type = unassigned RNA
gcgcgccactactcaccgtctcctg

SEQ ID NO: 6351 - RNA, 25 nt, Homo sapiens
  source 1..25: mol_type = unassigned RNA
cactactcaccgtctcctggggaga

SEQ ID NO: 6352 - RNA, 25 nt, Homo sapiens
  source 1..25: mol_type = unassigned RNA
gagatggtttccacctgcactccca

SEQ ID NO: 6353 - RNA, 25 nt, Homo sapiens
  source 1..25: mol_type = unassigned RNA
atggtttccacctgcactcccatgg

SEQ ID NO: 6354 - RNA, 25 nt, Homo sapiens
  source 1..25: mol_type = unassigned RNA
gtttccacctgcactcccatggcgg

SEQ ID NO: 6355 - RNA, 25 nt, Homo sapiens
  source 1..25: mol_type = unassigned RNA
tccacctgcactcccatggcggcgg

SEQ ID NO: 6356 - RNA, 25 nt, Homo sapiens
  source 1..25: mol_type = unassigned RNA
tcccatggcggcggcggacgctgag

SEQ ID NO: 6357 - RNA, 25 nt, Homo sapiens
  source 1..25: mol_type = unassigned RNA
cccatggcggcggcggacgctgagc

SEQ ID NO: 6358 - RNA, 25 nt, Homo sapiens
  source 1..25: mol_type = unassigned RNA
atggcggcggcggacgctgagcggg

SEQ ID NO: 6359 - RNA, 25 nt, Homo sapiens
  source 1..25: mol_type = unassigned RNA
tggcggcggcggacgctgagcgggc

SEQ ID NO: 6360 - RNA, 25 nt, Homo sapiens
  source 1..25: mol_type = unassigned RNA
cggcggcggacgctgagcgggcggg

SEQ ID NO: 6361 - RNA, 25 nt, Homo sapiens
  source 1..25: mol_type = unassigned RNA
gacgctgagcgggcgggcggcgcga

SEQ ID NO: 6362 - RNA, 25 nt, Homo sapiens
  source 1..25: mol_type = unassigned RNA
acgctgagcgggcgggcggcgcgac

SEQ ID NO: 6363 - RNA, 25 nt, Homo sapiens
  source 1..25: mol_type = unassigned RNA
ctgagcgggcgggcggcgcgacggg

SEQ ID NO: 6364 - RNA, 25 nt, Homo sapiens
  source 1..25: mol_type = unassigned RNA
cgggcgggcggcgcgacgggcggcg

SEQ ID NO: 6365 - RNA, 25 nt, Homo sapiens
  source 1..25: mol_type = unassigned RNA
cgggcggcgtggaccaacagcgacc

SEQ ID NO: 6366 - RNA, 25 nt, Homo sapiens
  source 1..25: mol_type = unassigned RNA
gcggcgtggaccaacagcgacctgg

SEQ ID NO: 6367 - RNA, 25 nt, Homo sapiens
  source 1..25: mol_type = unassigned RNA
gcgtggaccaacagcgacctggcgg

SEQ ID NO: 6368 - RNA, 25 nt, Homo sapiens
  source 1..25: mol_type = unassigned RNA
caacagcgacctggcggcggttcca

SEQ ID NO: 6369 - RNA, 25 nt, Homo sapiens
  source 1..25: mol_type = unassigned RNA
ggttccacggctctgcctagtacct

SEQ ID NO: 6370 - RNA, 25 nt, Homo sapiens
  source 1..25: mol_type = unassigned RNA
cccagccctgcgtgcgcgccccaca

SEQ ID NO: 6371 - RNA, 25 nt, Homo sapiens
  source 1..25: mol_type = unassigned RNA
cctcagggcgcaccttccccaagcg

SEQ ID NO: 6372 - RNA, 25 nt, Homo sapiens
  source 1..25: mol_type = unassigned RNA
ttccccaagcgcggccagacctgcg

SEQ ID NO: 6373 - RNA, 25 nt, Homo sapiens
  source 1..25: mol_type = unassigned RNA
gccagacctgcgtggtgcactacac

SEQ ID NO: 6374 - RNA, 25 nt, Homo sapiens
  source 1..25: mol_type = unassigned RNA
tgcgtggtgcactacaccggtgagt

SEQ ID NO: 6375 - RNA, 25 nt, Homo sapiens
  source 1..25: mol_type = unassigned RNA
gcgtggtgcactacaccggtgagtc

SEQ ID NO: 6376 - RNA, 25 nt, Homo sapiens
  source 1..25: mol_type = unassigned RNA
cgtggtgcactacaccggtgagtcg

SEQ ID NO: 6377 - RNA, 25 nt, Homo sapiens
  source 1..25: mol_type = unassigned RNA
gtggtgcactacaccggtgagtcgg

SEQ ID NO: 6378 - RNA, 25 nt, Homo sapiens
  source 1..25: mol_type = unassigned RNA
ctacaccggtgagtcgggggcccag

SEQ ID NO: 6379 - RNA, 25 nt, Homo sapiens
  source 1..25: mol_type = unassigned RNA
tacaccggtgagtcgggggcccagc

SEQ ID NO: 6380 - RNA, 25 nt, Homo sapiens
  source 1..25: mol_type = unassigned RNA
acaccggtgagtcgggggcccagcg

SEQ ID NO: 6381 - RNA, 25 nt, Homo sapiens
  source 1..25: mol_type = unassigned RNA
ccggtgagtcgggggcccagcgggg

SEQ ID NO: 6382 - RNA, 25 nt, Homo sapiens
  source 1..25: mol_type = unassigned RNA
gactcaccggtgtagtgcaccacgc

SEQ ID NO: 6383 - RNA, 25 nt, Homo sapiens
  source 1..25: mol_type = unassigned RNA
accggtgtagtgcaccacgcaggtc

SEQ ID NO: 6384 - RNA, 25 nt, Homo sapiens
  source 1..25: mol_type = unassigned RNA
tgcaccacgcaggtctggccgcgct

SEQ ID NO: 6385 - RNA, 25 nt, Homo sapiens
  source 1..25: mol_type = unassigned RNA
gcaccacgcaggtctggccgcgctt

SEQ ID NO: 6386 - RNA, 25 nt, Homo sapiens
  source 1..25: mol_type = unassigned RNA
caccacgcaggtctggccgcgcttg

SEQ ID NO: 6387 - RNA, 25 nt, Homo sapiens
  source 1..25: mol_type = unassigned RNA
acgcaggtctggccgcgcttgggga

SEQ ID NO: 6388 - RNA, 25 nt, Homo sapiens
  source 1..25: mol_type = unassigned RNA
ccgcgcttggggaaggtgcgccctg

SEQ ID NO: 6389 - RNA, 25 nt, Homo sapiens
  source 1..25: mol_type = unassigned RNA
aaggtgcgccctgaggagacagaga

SEQ ID NO: 6390 - RNA, 25 nt, Homo sapiens
  source 1..25: mol_type = unassigned RNA
aggtgcgccctgaggagacagagac

SEQ ID NO: 6391 - RNA, 25 nt, Homo sapiens
  source 1..25: mol_type = unassigned RNA
tctttttcacagggatgcttgaaga

SEQ ID NO: 6392 - RNA, 25 nt, Homo sapiens
  source 1..25: mol_type = unassigned RNA
agatggaaagaaatttgattcctcc

SEQ ID NO: 6393 - RNA, 25 nt, Homo sapiens
  source 1..25: mol_type = unassigned RNA
gatggaaagaaatttgattcctccc

SEQ ID NO: 6394 - RNA, 25 nt, Homo sapiens
  source 1..25: mol_type = unassigned RNA
gaaacaagccctttaagtttatgct

SEQ ID NO: 6395 - RNA, 25 nt, Homo sapiens
  source 1..25: mol_type = unassigned RNA
ccctttaagtttatgctaggcaagc

SEQ ID NO: 6396 - RNA, 25 nt, Homo sapiens
  source 1..25: mol_type = unassigned RNA
tttaagtttatgctaggcaagcagg

SEQ ID NO: 6397 - RNA, 25 nt, Homo sapiens
  source 1..25: mol_type = unassigned RNA
tgctaggcaagcaggaggtgatccg

SEQ ID NO: 6398 - RNA, 25 nt, Homo sapiens
  source 1..25: mol_type = unassigned RNA
aggcaagcaggaggtgatccgaggc

SEQ ID NO: 6399 - RNA, 25 nt, Homo sapiens
  source 1..25: mol_type = unassigned RNA
ggcaagcaggaggtgatccgaggct

SEQ ID NO: 6400 - RNA, 25 nt, Homo sapiens
  source 1..25: mol_type = unassigned RNA
aggaggtgatccgaggctgggaaga

SEQ ID NO: 6401 - RNA, 25 nt, Homo sapiens
  source 1..25: mol_type = unassigned RNA
ggaggtgatccgaggctgggaagaa

SEQ ID NO: 6402 - RNA, 25 nt, Homo sapiens
  source 1..25: mol_type = unassigned RNA
gaggtgatccgaggctgggaagaag

SEQ ID NO: 6403 - RNA, 25 nt, Homo sapiens
  source 1..25: mol_type = unassigned RNA
cgaggctgggaagaaggggttgccc

SEQ ID NO: 6404 - RNA, 25 nt, Homo sapiens
  source 1..25: mol_type = unassigned RNA
aacaaaacaaatgagagagcatacc

SEQ ID NO: 6405 - RNA, 25 nt, Homo sapiens
  source 1..25: mol_type = unassigned RNA
acaaaacaaatgagagagcatacct

SEQ ID NO: 6406 - RNA, 25 nt, Homo sapiens
  source 1..25: mol_type = unassigned RNA
ctgggcaaccccttcttcccagcct

SEQ ID NO: 6407 - RNA, 25 nt, Homo sapiens
  source 1..25: mol_type = unassigned RNA
tcctgcttgcctagcataaacttaa

SEQ ID NO: 6408 - RNA, 25 nt, Homo sapiens
  source 1..25: mol_type = unassigned RNA
cctgcttgcctagcataaacttaaa

SEQ ID NO: 6409 - RNA, 25 nt, Homo sapiens
  source 1..25: mol_type = unassigned RNA
aaacttaaagggcttgtttctgtcc

SEQ ID NO: 6410 - RNA, 25 nt, Homo sapiens
  source 1..25: mol_type = unassigned RNA
aacttaaagggcttgtttctgtccc

SEQ ID NO: 6411 - RNA, 25 nt, Homo sapiens
  source 1..25: mol_type = unassigned RNA
ttaaagggcttgtttctgtcccggg

SEQ ID NO: 6412 - RNA, 25 nt, Homo sapiens
  source 1..25: mol_type = unassigned RNA
tccttgttcttttcacagatgagtg

SEQ ID NO: 6413 - RNA, 25 nt, Homo sapiens
  source 1..25: mol_type = unassigned RNA
ccttgttcttttcacagatgagtgt

SEQ ID NO: 6414 - RNA, 25 nt, Homo sapiens
  source 1..25: mol_type = unassigned RNA
tgactatatctccagattatgccta

SEQ ID NO: 6415 - RNA, 25 nt, Homo sapiens
  source 1..25: mol_type = unassigned RNA
ctccagattatgcctatggtgccac

SEQ ID NO: 6416 - RNA, 25 nt, Homo sapiens
  source 1..25: mol_type = unassigned RNA
tccagattatgcctatggtgccact

SEQ ID NO: 6417 - RNA, 25 nt, Homo sapiens
  source 1..25: mol_type = unassigned RNA
atgcctatggtgccactgggcaccc

SEQ ID NO: 6418 - RNA, 25 nt, Homo sapiens
  source 1..25: mol_type = unassigned RNA
ccacatgccactctcgtcttcgatg

SEQ ID NO: 6419 - RNA, 25 nt, Homo sapiens
  source 1..25: mol_type = unassigned RNA
gtcttcgatgtggagcttctaaaac

SEQ ID NO: 6420 - RNA, 25 nt, Homo sapiens
  source 1..25: mol_type = unassigned RNA
gtggagcttctaaaactggaatgac

SEQ ID NO: 6421 - RNA, 25 nt, Homo sapiens
  source 1..25: mol_type = unassigned RNA
gcttctaaaactggaatgacaggaa

SEQ ID NO: 6422 - RNA, 25 nt, Homo sapiens
  source 1..25: mol_type = unassigned RNA
gcctcctcccttagctccctgttct

SEQ ID NO: 6423 - RNA, 25 nt, Homo sapiens
  source 1..25: mol_type = unassigned RNA
cctcctcccttagctccctgttctt

SEQ ID NO: 6424 - RNA, 25 nt, Homo sapiens
  source 1..25: mol_type = unassigned RNA
tcccttagctccctgttcttgggta

SEQ ID NO: 6425 - RNA, 25 nt, Homo sapiens
  source 1..25: mol_type = unassigned RNA
agctccctgttcttgggtaaggaaa

SEQ ID NO: 6426 - RNA, 25 nt, Homo sapiens
  source 1..25: mol_type = unassigned RNA
cttgggtaaggaaatggaatactga

SEQ ID NO: 6427 - RNA, 25 nt, Homo sapiens
  source 1..25: mol_type = unassigned RNA
ttgggtaaggaaatggaatactgaa

SEQ ID NO: 6428 - RNA, 25 nt, Homo sapiens
  source 1..25: mol_type = unassigned RNA
gtattccatttccttacccaagaac

SEQ ID NO: 6429 - RNA, 25 nt, Homo sapiens
  source 1..25: mol_type = unassigned RNA
tattccatttccttacccaagaaca

SEQ ID NO: 6430 - RNA, 25 nt, Homo sapiens
  source 1..25: mol_type = unassigned RNA
ttccttacccaagaacagggagcta

SEQ ID NO: 6431 - RNA, 25 nt, Homo sapiens
  source 1..25: mol_type = unassigned RNA
tccttacccaagaacagggagctaa

SEQ ID NO: 6432 - RNA, 25 nt, Homo sapiens
  source 1..25: mol_type = unassigned RNA
ttacccaagaacagggagctaaggg

SEQ ID NO: 6433 - RNA, 25 nt, Homo sapiens
  source 1..25: mol_type = unassigned RNA
cccaagaacagggagctaagggagg

SEQ ID NO: 6434 - RNA, 25 nt, Homo sapiens
  source 1..25: mol_type = unassigned RNA
agaagctccacatcgaagacgagag

SEQ ID NO: 6435 - RNA, 25 nt, Homo sapiens
  source 1..25: mol_type = unassigned RNA
ccacatcgaagacgagagtggcatg

SEQ ID NO: 6436 - RNA, 25 nt, Homo sapiens
  source 1..25: mol_type = unassigned RNA
catcgaagacgagagtggcatgtgg

SEQ ID NO: 6437 - RNA, 25 nt, Homo sapiens
  source 1..25: mol_type = unassigned RNA
atcgaagacgagagtggcatgtggt

SEQ ID NO: 6438 - RNA, 25 nt, Homo sapiens
  source 1..25: mol_type = unassigned RNA
gagtggcatgtggtgggatgatgcc

SEQ ID NO: 6439 - RNA, 25 nt, Homo sapiens
  source 1..25: mol_type = unassigned RNA
agtggcatgtggtgggatgatgcct

SEQ ID NO: 6440 - RNA, 25 nt, Homo sapiens
  source 1..25: mol_type = unassigned RNA
ggtgggatgatgcctgggtgcccag

SEQ ID NO: 6441 - RNA, 25 nt, Homo sapiens
  source 1..25: mol_type = unassigned RNA
atgcctgggtgcccagtggcaccat

SEQ ID NO: 6442 - RNA, 25 nt, Homo sapiens
  source 1..25: mol_type = unassigned RNA
gcccagtggcaccataggcataatc

SEQ ID NO: 6443 - RNA, 25 nt, Homo sapiens
  source 1..25: mol_type = unassigned RNA
gcataatctggagatatagtcagtt

SEQ ID NO: 6444 - RNA, 25 nt, Homo sapiens
  source 1..25: mol_type = unassigned RNA
cccacactcatctgtgaaaagaaca

SEQ ID NO: 6445 - RNA, 25 nt, Homo sapiens
  source 1..25: mol_type = unassigned RNA
ttttctgtccccaacagatctgcca

SEQ ID NO: 6446 - RNA, 25 nt, Homo sapiens
  source 1..25: mol_type = unassigned RNA
tctgtccccaacagatctgccatgg

SEQ ID NO: 6447 - RNA, 25 nt, Homo sapiens
  source 1..25: mol_type = unassigned RNA
ctgtccccaacagatctgccatgga

SEQ ID NO: 6448 - RNA, 25 nt, Homo sapiens
  source 1..25: mol_type = unassigned RNA
ccaacagatctgccatggagggatc

SEQ ID NO: 6449 - RNA, 25 nt, Homo sapiens
  source 1..25: mol_type = unassigned RNA
ccagacatgtgcacatgaatccata

SEQ ID NO: 6450 - RNA, 25 nt, Homo sapiens
  source 1..25: mol_type = unassigned RNA
tattcattttattttgttttcattt

SEQ ID NO: 6451 - RNA, 25 nt, Homo sapiens
  source 1..25: mol_type = unassigned RNA
attcattttattttgttttcatttt

SEQ ID NO: 6452 - RNA, 25 nt, Homo sapiens
  source 1..25: mol_type = unassigned RNA
ttcattttattttgttttcattttg

SEQ ID NO: 6453 - RNA, 25 nt, Homo sapiens
  source 1..25: mol_type = unassigned RNA
gggtgaagattcagtttcagtcttt

SEQ ID NO: 6454 - RNA, 25 nt, Homo sapiens
  source 1..25: mol_type = unassigned RNA
gattcagtttcagtcttttggatat

SEQ ID NO: 6455 - RNA, 25 nt, Homo sapiens
  source 1..25: mol_type = unassigned RNA
ggatataggtttccaattaagtaca

SEQ ID NO: 6456 - RNA, 25 nt, Homo sapiens
  source 1..25: mol_type = unassigned RNA
catggtcaagtattaacagcacaag

SEQ ID NO: 6457 - RNA, 25 nt, Homo sapiens
  source 1..25: mol_type = unassigned RNA
gtcaagtattaacagcacaagtggt

SEQ ID NO: 6458 - RNA, 25 nt, Homo sapiens
  source 1..25: mol_type = unassigned RNA
acaagtggtaggttaacattagaat

SEQ ID NO: 6459 - RNA, 25 nt, Homo sapiens
  source 1..25: mol_type = unassigned RNA
ggtaggttaacattagaataggaat

SEQ ID NO: 6460 - RNA, 25 nt, Homo sapiens
  source 1..25: mol_type = unassigned RNA
ttaacattagaataggaattggtgt

SEQ ID NO: 6461 - RNA, 25 nt, Homo sapiens
  source 1..25: mol_type = unassigned RNA
taacattagaataggaattggtgtt

SEQ ID NO: 6462 - RNA, 25 nt, Homo sapiens
  source 1..25: mol_type = unassigned RNA
aacattagaataggaattggtgttg

SEQ ID NO: 6463 - RNA, 25 nt, Homo sapiens
  source 1..25: mol_type = unassigned RNA
acattagaataggaattggtgttgg

SEQ ID NO: 6464 - RNA, 25 nt, Homo sapiens
  source 1..25: mol_type = unassigned RNA
cattagaataggaattggtgttggg

SEQ ID NO: 6465 - RNA, 25 nt, Homo sapiens
  source 1..25: mol_type = unassigned RNA
attagaataggaattggtgttgggg

SEQ ID NO: 6466 - RNA, 25 nt, Homo sapiens
  source 1..25: mol_type = unassigned RNA
ttagaataggaattggtgttggggg

SEQ ID NO: 6467 - RNA, 25 nt, Homo sapiens
  source 1..25: mol_type = unassigned RNA
tagaataggaattggtgttgggggg

SEQ ID NO: 6468 - RNA, 25 nt, Homo sapiens
  source 1..25: mol_type = unassigned RNA
agaataggaattggtgttggggggg

SEQ ID NO: 6469 - RNA, 25 nt, Homo sapiens
  source 1..25: mol_type = unassigned RNA
gcaagaatattttattttaattttt

SEQ ID NO: 6470 - RNA, 25 nt, Homo sapiens
  source 1..25: mol_type = unassigned RNA
gcgctgcaaagccatagcagatttg

SEQ ID NO: 6471 - RNA, 25 nt, Homo sapiens
  source 1..25: mol_type = unassigned RNA
ccatagcagatttgaggcgctgttg

SEQ ID NO: 6472 - RNA, 25 nt, Homo sapiens
  source 1..25: mol_type = unassigned RNA
tactctccaagttgagagatgtctt

SEQ ID NO: 6473 - RNA, 25 nt, Homo sapiens
  source 1..25: mol_type = unassigned RNA
actctccaagttgagagatgtcttt

SEQ ID NO: 6474 - RNA, 25 nt, Homo sapiens
  source 1..25: mol_type = unassigned RNA
aaattaaaagccctacctaaaactg

SEQ ID NO: 6475 - RNA, 25 nt, Homo sapiens
  source 1..25: mol_type = unassigned RNA
ttaaaagccctacctaaaactgagg

SEQ ID NO: 6476 - RNA, 25 nt, Homo sapiens
  source 1..25: mol_type = unassigned RNA
taaaagccctacctaaaactgaggt

SEQ ID NO: 6477 - RNA, 25 nt, Homo sapiens
  source 1..25: mol_type = unassigned RNA
aaaagccctacctaaaactgaggtg

SEQ ID NO: 6478 - RNA, 25 nt, Homo sapiens
  source 1..25: mol_type = unassigned RNA
gccctacctaaaactgaggtgggga

SEQ ID NO: 6479 - RNA, 25 nt, Homo sapiens
  source 1..25: mol_type = unassigned RNA
ccctacctaaaactgaggtggggat

SEQ ID NO: 6480 - RNA, 25 nt, Homo sapiens
  source 1..25: mol_type = unassigned RNA
cctacctaaaactgaggtggggatg

SEQ ID NO: 6481 - RNA, 25 nt, Homo sapiens
  source 1..25: mol_type = unassigned RNA
aagtagatcatgttcactgcaatgc

SEQ ID NO: 6482 - RNA, 25 nt, Homo sapiens
  source 1..25: mol_type = unassigned RNA
tgttcactgcaatgctggacactac

SEQ ID NO: 6483 - RNA, 25 nt, Homo sapiens
  source 1..25: mol_type = unassigned RNA
gctggacactacaggtatctgtccc

SEQ ID NO: 6484 - RNA, 25 nt, Homo sapiens
  source 1..25: mol_type = unassigned RNA
ctggacactacaggtatctgtccct

SEQ ID NO: 6485 - RNA, 25 nt, Homo sapiens
  source 1..25: mol_type = unassigned RNA
tacaggtatctgtccctgggccagc

SEQ ID NO: 6486 - RNA, 25 nt, Homo sapiens
  source 1..25: mol_type = unassigned RNA
acaggtatctgtccctgggccagca

SEQ ID NO: 6487 - RNA, 25 nt, Homo sapiens
  source 1..25: mol_type = unassigned RNA
gcagggacctctgaagccttctttg

SEQ ID NO: 6488 - RNA, 25 nt, Homo sapiens
  source 1..25: mol_type = unassigned RNA
gtggccttttttttttttcatcctg

SEQ ID NO: 6489 - RNA, 25 nt, Homo sapiens
  source 1..25: mol_type = unassigned RNA
ttttttcatcctgtggtttttctaa

SEQ ID NO: 6490 - RNA, 25 nt, Homo sapiens
  source 1..25: mol_type = unassigned RNA
cctgtggtttttctaatggactttc

SEQ ID NO: 6491 - RNA, 25 nt, Homo sapiens
  source 1..25: mol_type = unassigned RNA
aactttaattgacagtttcaattga

SEQ ID NO: 6492 - RNA, 25 nt, Homo sapiens
  source 1..25: mol_type = unassigned RNA
gaatgttctcttaagaaaatgatgc

SEQ ID NO: 6493 - RNA, 25 nt, Homo sapiens
  source 1..25: mol_type = unassigned RNA
tcagcatctcctgttttttgatgct

SEQ ID NO: 6494 - RNA, 25 nt, Homo sapiens
  source 1..25: mol_type = unassigned RNA
gctccctctgctgatctcagtttcc

SEQ ID NO: 6495 - RNA, 25 nt, Homo sapiens
  source 1..25: mol_type = unassigned RNA
ccctttgctgtcctgtgtagtgatt

SEQ ID NO: 6496 - RNA, 25 nt, Homo sapiens
  source 1..25: mol_type = unassigned RNA
ttattgcaataaaagtgctttatgc

SEQ ID NO: 6497 - RNA, 25 nt, Homo sapiens
  source 1..25: mol_type = unassigned RNA
gccggcttttctcagctctgtgtca

SEQ ID NO: 6498 - RNA, 25 nt, Homo sapiens
  source 1..25: mol_type = unassigned RNA
ggcttttctcagctctgtgtcatgg

SEQ ID NO: 6499 - RNA, 25 nt, Homo sapiens
  source 1..25: mol_type = unassigned RNA
gctctgtgtcatggtggttattttc

SEQ ID NO: 6500 - RNA, 25 nt, Homo sapiens
  source 1..25: mol_type = unassigned RNA
attttcaggtgcctcccctgccatt

SEQ ID NO: 6501 - RNA, 25 nt, Homo sapiens
  source 1..25: mol_type = unassigned RNA
accatgacacagagctgagaaaagc

SEQ ID NO: 6502 - RNA, 25 nt, Homo sapiens
  source 1..25: mol_type = unassigned RNA
aataataaaacttgagactcataaa

SEQ ID NO: 6503 - RNA, 25 nt, Homo sapiens
  source 1..25: mol_type = unassigned RNA
aaaacttgagactcataaatggtgc

SEQ ID NO: 6504 - RNA, 25 nt, Homo sapiens
  source 1..25: mol_type = unassigned RNA
aaacttgagactcataaatggtgct

SEQ ID NO: 6505 - RNA, 25 nt, Homo sapiens
  source 1..25: mol_type = unassigned RNA
aacttgagactcataaatggtgctg

SEQ ID NO: 6506 - RNA, 25 nt, Homo sapiens
  source 1..25: mol_type = unassigned RNA
acttgagactcataaatggtgctgg

SEQ ID NO: 6507 - RNA, 25 nt, Homo sapiens
  source 1..25: mol_type = unassigned RNA
gagactcataaatggtgctggggga

SEQ ID NO: 6508 - RNA, 25 nt, Homo sapiens
  source 1..25: mol_type = unassigned RNA
agactcataaatggtgctgggggaa

SEQ ID NO: 6509 - RNA, 25 nt, Homo sapiens
  source 1..25: mol_type = unassigned RNA
acgatttctcaccaaatcactacac

SEQ ID NO: 6510 - RNA, 25 nt, Homo sapiens
  source 1..25: mol_type = unassigned RNA
accaaatcactacacaggacagcaa

SEQ ID NO: 6511 - RNA, 25 nt, Homo sapiens
  source 1..25: mol_type = unassigned RNA
ccaaatcactacacaggacagcaaa

SEQ ID NO: 6512 - RNA, 25 nt, Homo sapiens
  source 1..25: mol_type = unassigned RNA
caaatcactacacaggacagcaaag

SEQ ID NO: 6513 - RNA, 25 nt, Homo sapiens
  source 1..25: mol_type = unassigned RNA
tacacaggacagcaaaggggtgaga

SEQ ID NO: 6514 - RNA, 25 nt, Homo sapiens
  source 1..25: mol_type = unassigned RNA
acacaggacagcaaaggggtgagaa

SEQ ID NO: 6515 - RNA, 25 nt, Homo sapiens
  source 1..25: mol_type = unassigned RNA
cacaggacagcaaaggggtgagaag

SEQ ID NO: 6516 - RNA, 25 nt, Homo sapiens
  source 1..25: mol_type = unassigned RNA
acagcaaaggggtgagaaggggctg

SEQ ID NO: 6517 - RNA, 25 nt, Homo sapiens
  source 1..25: mol_type = unassigned RNA
cagcaaaggggtgagaaggggctga

SEQ ID NO: 6518 - RNA, 25 nt, Homo sapiens
  source 1..25: mol_type = unassigned RNA
caaaggggtgagaaggggctgaggg

SEQ ID NO: 6519 - RNA, 25 nt, Homo sapiens
  source 1..25: mol_type = unassigned RNA
agaaggggctgagggaggaaaagcc

SEQ ID NO: 6520 - RNA, 25 nt, Homo sapiens
  source 1..25: mol_type = unassigned RNA
aaagccaggaaactgagatcagcag

SEQ ID NO: 6521 - RNA, 25 nt, Homo sapiens
  source 1..25: mol_type = unassigned RNA
aagccaggaaactgagatcagcaga

SEQ ID NO: 6522 - RNA, 25 nt, Homo sapiens
  source 1..25: mol_type = unassigned RNA
cagagggagccaagcatcaaaaaac

SEQ ID NO: 6523 - RNA, 25 nt, Homo sapiens
  source 1..25: mol_type = unassigned RNA
catcattttcttaagagaacattca

SEQ ID NO: 6524 - RNA, 25 nt, Homo sapiens
  source 1..25: mol_type = unassigned RNA
gagaacattcaaggatttgtcatga

SEQ ID NO: 6525 - RNA, 25 nt, Homo sapiens
  source 1..25: mol_type = unassigned RNA
acattcaaggatttgtcatgatggc

SEQ ID NO: 6526 - RNA, 25 nt, Homo sapiens
  source 1..25: mol_type = unassigned RNA
cattcaaggatttgtcatgatggct

SEQ ID NO: 6527 - RNA, 25 nt, Homo sapiens
  source 1..25: mol_type = unassigned RNA
tttgtcatgatggctgggctttcac

SEQ ID NO: 6528 - RNA, 25 nt, Homo sapiens
  source 1..25: mol_type = unassigned RNA
ttgtcatgatggctgggctttcact

SEQ ID NO: 6529 - RNA, 25 nt, Homo sapiens
  source 1..25: mol_type = unassigned RNA
ctgtcaattaaagttcttaagattt

SEQ ID NO: 6530 - RNA, 25 nt, Homo sapiens
  source 1..25: mol_type = unassigned RNA
attaaagttcttaagatttaggaag

SEQ ID NO: 6531 - RNA, 25 nt, Homo sapiens
  source 1..25: mol_type = unassigned RNA
aaagttcttaagatttaggaagtgg

SEQ ID NO: 6532 - RNA, 25 nt, Homo sapiens
  source 1..25: mol_type = unassigned RNA
ttaagatttaggaagtggtggagct

SEQ ID NO: 6533 - RNA, 25 nt, Homo sapiens
  source 1..25: mol_type = unassigned RNA
cctgaaagtccattagaaaaaccac

SEQ ID NO: 6534 - RNA, 25 nt, Homo sapiens
  source 1..25: mol_type = unassigned RNA
aaaaccacaggatgaaaaaaaaaaa

SEQ ID NO: 6535 - RNA, 25 nt, Homo sapiens
  source 1..25: mol_type = unassigned RNA
tgaaaaaaaaaaaaggccacaaaga

SEQ ID NO: 6536 - RNA, 25 nt, Homo sapiens
  source 1..25: mol_type = unassigned RNA
aaaaaggccacaaagaaggcttcag

SEQ ID NO: 6537 - RNA, 25 nt, Homo sapiens
  source 1..25: mol_type = unassigned RNA
caaagaaggcttcagaggtccctgc

SEQ ID NO: 6538 - RNA, 25 nt, Homo sapiens
  source 1..25: mol_type = unassigned RNA
aggcttcagaggtccctgctggccc

SEQ ID NO: 6539 - RNA, 25 nt, Homo sapiens
  source 1..25: mol_type = unassigned RNA
ggcttcagaggtccctgctggccca

SEQ ID NO: 6540 - RNA, 25 nt, Homo sapiens
  source 1..25: mol_type = unassigned RNA
tgcagtgaacatgatctactttcaa

SEQ ID NO: 6541 - RNA, 25 nt, Homo sapiens
  source 1..25: mol_type = unassigned RNA
gaacatgatctactttcaaaggcag

SEQ ID NO: 6542 - RNA, 25 nt, Homo sapiens
  source 1..25: mol_type = unassigned RNA
aacatgatctactttcaaaggcaga

SEQ ID NO: 6543 - RNA, 25 nt, Homo sapiens
  source 1..25: mol_type = unassigned RNA
tctactttcaaaggcagagggttta

SEQ ID NO: 6544 - RNA, 25 nt, Homo sapiens
  source 1..25: mol_type = unassigned RNA
ctactttcaaaggcagagggtttaa

SEQ ID NO: 6545 - RNA, 25 nt, Homo sapiens
  source 1..25: mol_type = unassigned RNA
tactttcaaaggcagagggtttaag

SEQ ID NO: 6546 - RNA, 25 nt, Homo sapiens
  source 1..25: mol_type = unassigned RNA
tttcaaaggcagagggtttaagggg

SEQ ID NO: 6547 - RNA, 25 nt, Homo sapiens
  source 1..25: mol_type = unassigned RNA
ttcaaaggcagagggtttaagggga

SEQ ID NO: 6548 - RNA, 25 nt, Homo sapiens
  source 1..25: mol_type = unassigned RNA
aaaggcagagggtttaaggggaggg

SEQ ID NO: 6549 - RNA, 25 nt, Homo sapiens
  source 1..25: mol_type = unassigned RNA
aaggcagagggtttaaggggagggt

SEQ ID NO: 6550 - RNA, 25 nt, Homo sapiens
  source 1..25: mol_type = unassigned RNA
gcagagggtttaaggggagggtggg

SEQ ID NO: 6551 - RNA, 25 nt, Homo sapiens
  source 1..25: mol_type = unassigned RNA
cagagggtttaaggggagggtgggt

SEQ ID NO: 6552 - RNA, 25 nt, Homo sapiens
  source 1..25: mol_type = unassigned RNA
ggtttaaggggagggtgggtgggaa

SEQ ID NO: 6553 - RNA, 25 nt, Homo sapiens
  source 1..25: mol_type = unassigned RNA
ttaaggggagggtgggtgggaatgg

SEQ ID NO: 6554 - RNA, 25 nt, Homo sapiens
  source 1..25: mol_type = unassigned RNA
aggggagggtgggtgggaatggtgg

SEQ ID NO: 6555 - RNA, 25 nt, Homo sapiens
  source 1..25: mol_type = unassigned RNA
gggtgggtgggaatggtggaggcaa

SEQ ID NO: 6556 - RNA, 25 nt, Homo sapiens
  source 1..25: mol_type = unassigned RNA
ctctccccatccccacctcagtttt

SEQ ID NO: 6557 - RNA, 25 nt, Homo sapiens
  source 1..25: mol_type = unassigned RNA
ccccatccccacctcagttttaggt

SEQ ID NO: 6558 - RNA, 25 nt, Homo sapiens
  source 1..25: mol_type = unassigned RNA
cccatccccacctcagttttaggta

SEQ ID NO: 6559 - RNA, 25 nt, Homo sapiens
  source 1..25: mol_type = unassigned RNA
tttaacccaaagacatctctcaact

SEQ ID NO: 6560 - RNA, 25 nt, Homo sapiens
  source 1..25: mol_type = unassigned RNA
cctcaacagcgcctcaaatctgcta

SEQ ID NO: 6561 - RNA, 25 nt, Homo sapiens
  source 1..25: mol_type = unassigned RNA
gttaatacttgaccatgtacttaat

SEQ ID NO: 6562 - RNA, 25 nt, Homo sapiens
  source 1..25: mol_type = unassigned RNA
aaaacaaaataaaatgaataacttg

SEQ ID NO: 6563 - RNA, 25 nt, Homo sapiens
  source 1..25: mol_type = unassigned RNA
aataaaatgaataacttgaggttta

SEQ ID NO: 6564 - RNA, 25 nt, Homo sapiens
  source 1..25: mol_type = unassigned RNA
acttgaggtttatggcatatagttt

SEQ ID NO: 6565 - RNA, 25 nt, Homo sapiens
  source 1..25: mol_type = unassigned RNA
tatagtttaggtaaacacacatacg

SEQ ID NO: 6566 - RNA, 25 nt, Homo sapiens
  source 1..25: mol_type = unassigned RNA
taggtaaacacacatacgaggagaa

SEQ ID NO: 6567 - RNA, 25 nt, Homo sapiens
  source 1..25: mol_type = unassigned RNA
aggtaaacacacatacgaggagaaa

SEQ ID NO: 6568 - RNA, 25 nt, Homo sapiens
  source 1..25: mol_type = unassigned RNA
ggtaaacacacatacgaggagaaag

SEQ ID NO: 6569 - RNA, 25 nt, Homo sapiens
  source 1..25: mol_type = unassigned RNA
cacacatacgaggagaaaggggaag

SEQ ID NO: 6570 - RNA, 25 nt, Homo sapiens
  source 1..25: mol_type = unassigned RNA
gaggagaaaggggaagaggaaacag

SEQ ID NO: 6571 - RNA, 25 nt, Homo sapiens
  source 1..25: mol_type = unassigned RNA
aaaggggaagaggaaacagaggtgt

SEQ ID NO: 6572 - RNA, 25 nt, Homo sapiens
  source 1..25: mol_type = unassigned RNA
gctgagtgacagaacacattcagtc

SEQ ID NO: 6573 - RNA, 25 nt, Homo sapiens
  source 1..25: mol_type = unassigned RNA
ctgagtgacagaacacattcagtca

SEQ ID NO: 6574 - RNA, 25 nt, Homo sapiens
  source 1..25: mol_type = unassigned RNA
agtcagggcagatgtctatacaaag

SEQ ID NO: 6575 - RNA, 25 nt, Homo sapiens
  source 1..25: mol_type = unassigned RNA
gggcagatgtctatacaaagtggag

SEQ ID NO: 6576 - RNA, 25 nt, Homo sapiens
  source 1..25: mol_type = unassigned RNA
tctatacaaagtggagtggaacatc

SEQ ID NO: 6577 - RNA, 25 nt, Homo sapiens
  source 1..25: mol_type = unassigned RNA
gtggaacatcaggaaaagctccata

SEQ ID NO: 6578 - RNA, 25 nt, Homo sapiens
  source 1..25: mol_type = unassigned RNA
ccatatggattcatgtgcacatgtc

SEQ ID NO: 6579 - RNA, 25 nt, Homo sapiens
  source 1..25: mol_type = unassigned RNA
tatggattcatgtgcacatgtctgg

SEQ ID NO: 6580 - RNA, 25 nt, Homo sapiens
  source 1..25: mol_type = unassigned RNA
tgtctggaggcaccagatccctcca

SEQ ID NO: 6581 - RNA, 25 nt, Homo sapiens
  source 1..25: mol_type = unassigned RNA
ccagatccctccatggcagatctgt

SEQ ID NO: 6582 - RNA, 25 nt, Homo sapiens
  source 1..25: mol_type = unassigned RNA
cagatccctccatggcagatctgtt

SEQ ID NO: 6583 - RNA, 25 nt, Homo sapiens
  source 1..25: mol_type = unassigned RNA
agatccctccatggcagatctgttg

SEQ ID NO: 6584 - RNA, 12 nt, synthetic construct
  misc_feature 1..12: note = Description of Artificial Sequence: Synthetic oligonucleotide
  source 1..12: mol_type = other RNA
gttttagagcta

SEQ ID NO: 6585 - RNA, 12 nt, synthetic construct
  misc_feature 1..12: note = Description of Artificial Sequence: Synthetic oligonucleotide
  source 1..12: mol_type = other RNA
gtttaagagcta

SEQ ID NO: 6586-6588 - skipped (3 entries)

SEQ ID NO: 6589 - RNA, 60 nt, synthetic construct
  misc_feature 1..60: note = Description of Artificial Sequence: Synthetic oligonucleotide
  source 1..60: mol_type = other RNA
tagcaagttaaaataaggctagtccgttatcaacttgaaaaagtggcaccgagtcggtgc

SEQ ID NO: 6590 - RNA, 60 nt, synthetic construct
  misc_feature 1..60: note = Description of Artificial Sequence: Synthetic oligonucleotide
  source 1..60: mol_type = other RNA
tagcaagtttaaataaggctagtccgttatcaacttgaaaaagtggcaccgagtcggtgc

SEQ ID NO: 6591 - skipped

SEQ ID NO: 6592 - protein, 40 aa, synthetic construct
  VARIANT 1..40: note = MISC_FEATURE - This sequence may encompass 1-10 GGGS repeating units
  REGION 1..40: note = Description of Artificial Sequence: Synthetic polypeptide
GGGSGGGSGGGSGGGSGGGSGGGSGGGSGGGSGGGSGGGS

SEQ ID NO: 6593 - protein, 20 aa, synthetic construct
  REGION 1..20: note = Description of Artificial Sequence: Synthetic peptide
GGGGSGGGGSGGGGSGGGGS

SEQ ID NO: 6594 - protein, 15 aa, synthetic construct
  REGION 1..15: note = Description of Artificial Sequence: Synthetic peptide
GGGGSGGGGSGGGGS

SEQ ID NO: 6595 - protein, 4 aa, synthetic construct
  REGION 1..4: note = Description of Artificial Sequence: Synthetic peptide
GGGS

SEQ ID NO: 6596 - DNA, 5000 bp, synthetic construct
  misc_difference 1..5000: note = misc_feature - This sequence may encompass 50-5000 nucleotides
  misc_feature 1..5000: note = Description of Artificial Sequence: Synthetic polynucleotide
  source 1..5000: mol_type = other DNA
aaaaaaaaaaaaaaaaaaaaaaaaaaaaaaaaaaaaaaaaaaaaaaaaaaaaaaaaaaaaaaaaaaaaaaaaaaaaaaaaaaaaaaaaaaaaaaaaaaaaaaaaaaaaaaaaaaaaaaaaaaaaaaaaaaaaaaaaaaaaaaaaaaaaaaaaaaaaaaaaaaaaaaaaaaaaaaaaaaaaaaaaaaaaaaaaaaaaaaaaaaaaaaaaaaaaaaaaaaaaaaaaaaaaaaaaaaaaaaaaaaaaaaaaaaaaaaaaaaaaaaaaaaaaaaaaaaaaaaaaaaaaaaaaaaaaaaaaaaaaaaaaaaaaaaaaaaaaaaaaaaaaaaaaaaaaaaaaaaaaaaaaaaaaaaaaaaaaaaaaaaaaaaaaaaaaaaaaaaaaaaaaaaaaaaaaaaaaaaaaaaaaaaaaaaaaaaaaaaaaaaaaaaaaaaaaaaaaaaaaaaaaaaaaaaaaaaaaaaaaaaaaaaaaaaaaaaaaaaaaaaaaaaaaaaaaaaaaaaaaaaaaaaaaaaaaaaaaaaaaaaaaaaaaaaaaaaaaaaaaaaaaaaaaaaaaaaaaaaaaaaaaaaaaaaaaaaaaaaaaaaaaaaaaaaaaaaaaaaaaaaaaaaaaaaaaaaaaaaaaaaaaaaaaaaaaaaaaaaaaaaaaaaaaaaaaaaaaaaaaaaaaaaaaaaaaaaaaaaaaaaaaaaaaaaaaaaaaaaaaaaaaaaaaaaaaaaaaaaaaaaaaaaaaaaaaaaaaaaaaaaaaaaaaaaaaaaaaaaaaaaaaaaaaaaaaaaaaaaaaaaaaaaaaaaaaaaaaaaaaaaaaaaaaaaaaaaaaaaaaaaaaaaaaaaaaaaaaaaaaaaaaaaaaaaaaaaaaaaaaaaaaaaaaaaaaaaaaaaaaaaaaaaaaaaaaaaaaaaaaaaaaaaaaaaaaaaaaaaaaaaaaaaaaaaaaaaaaaaaaaaaaaaaaaaaaaaaaaaaaaaaaaaaaaaaaaaaaaaaaaaaaaaaaaaaaaaaaaaaaaaaaaaaaaaaaaaaaaaaaaaaaaaaaaaaaaaaaaaaaaaaaaaaaaaaaaaaaaaaaaaaaaaaaaaaaaaaaaaaaaaaaaaaaaaaaaaaaaaaaaaaaaaaaaaaaaaaaaaaaaaaaaaaaaaaaaaaaaaaaaaaaaaaaaaaaaaaaaaaaaaaaaaaaaaaaaaaaaaaaaaaaaaaaaaaaaaaaaaaaaaaaaaaaaaaaaaaaaaaaaaaaaaaaaaaaaaaaaaaaaaaaaaaaaaaaaaaaaaaaaaaaaaaaaaaaaaaaaaaaaaaaaaaaaaaaaaaaaaaaaaaaaaaaaaaaaaaaaaaaaaaaaaaaaaaaaaaaaaaaaaaaaaaaaaaaaaaaaaaaaaaaaaaaaaaaaaaaaaaaaaaaaaaaaaaaaaaaaaaaaaaaaaaaaaaaaaaaaaaaaaaaaaaaaaaaaaaaaaaaaaaaaaaaaaaaaaaaaaaaaaaaaaaaaaaaaaaaaaaaaaaaaaaaaaaaaaaaaaaaaaaaaaaaaaaaaaaaaaaaaaaaaaaaaaaaaaaaaaaaaaaaaaaaaaaaaaaaaaaaaaaaaaaaaaaaaaaaaaaaaaaaaaaaaaaaaaaaaaaaaaaaaaaaaaaaaaaaaaaaaaaaaaaaaaaaaaaaaaaaaaaaaaaaaaaaaaaaaaaaaaaaaaaaaaaaaaaaaaaaaaaaaaaaaaaaaaaaaaaaaaaaaaaaaaaaaaaaaaaaaaaaaaaaaaaaaaaaaaaaaaaaaaaaaaaaaaaaaaaaaaaaaaaaaaaaaaaaaaaaaaaaaaaaaaaaaaaaaaaaaaaaaaaaaaaaaaaaaaaaaaaaaaaaaaaaaaaaaaaaaaaaaaaaaaaaaaaaaaaaaaaaaaaaaaaaaaaaaaaaaaaaaaaaaaaaaaaaaaaaaaaaaaaaaaaaaaaaaaaaaaaaaaaaaaaaaaaaaaaaaaaaaaaaaaaaaaaaaaaaaaaaaaaaaaaaaaaaaaaaaaaaaaaaaaaaaaaaaaaaaaaaaaaaaaaaaaaaaaaaaaaaaaaaaaaaaaaaaaaaaaaaaaaaaaaaaaaaaaaaaaaaaaaaaaaaaaaaaaaaaaaaaaaaaaaaaaaaaaaaaaaaaaaaaaaaaaaaaaaaaaaaaaaaaaaaaaaaaaaaaaaaaaaaaaaaaaaaaaaaaaaaaaaaaaaaaaaaaaaaaaaaaaaaaaaaaaaaaaaaaaaaaaaaaaaaaaaaaaaaaaaaaaaaaaaaaaaaaaaaaaaaaaaaaaaaaaaaaaaaaaaaaaaaaaaaaaaaaaaaaaaaaaaaaaaaaaaaaaaaaaaaaaaaaaaaaaaaaaaaaaaaaaaaaaaaaaaaaaaaaaaaaaaaaaaaaaaaaaaaaaaaaaaaaaaaaaaaaaaaaaaaaaaaaaaaaaaaaaaaaaaaaaaaaaaaaaaaaaaaaaaaaaaaaaaaaaaaaaaaaaaaaaaaaaaaaaaaaaaaaaaaaaaaaaaaaaaaaaaaaaaaaaaaaaaaaaaaaaaaaaaaaaaaaaaaaaaaaaaaaaaaaaaaaaaaaaaaaaaaaaaaaaaaaaaaaaaaaaaaaaaaaaaaaaaaaaaaaaaaaaaaaaaaaaaaaaaaaaaaaaaaaaaaaaaaaaaaaaaaaaaaaaaaaaaaaaaaaaaaaaaaaaaaaaaaaaaaaaaaaaaaaaaaaaaaaaaaaaaaaaaaaaaaaaaaaaaaaaaaaaaaaaaaaaaaaaaaaaaaaaaaaaaaaaaaaaaaaaaaaaaaaaaaaaaaaaaaaaaaaaaaaaaaaaaaaaaaaaaaaaaaaaaaaaaaaaaaaaaaaaaaaaaaaaaaaaaaaaaaaaaaaaaaaaaaaaaaaaaaaaaaaaaaaaaaaaaaaaaaaaaaaaaaaaaaaaaaaaaaaaaaaaaaaaaaaaaaaaaaaaaaaaaaaaaaaaaaaaaaaaaaaaaaaaaaaaaaaaaaaaaaaaaaaaaaaaaaaaaaaaaaaaaaaaaaaaaaaaaaaaaaaaaaaaaaaaaaaaaaaaaaaaaaaaaaaaaaaaaaaaaaaaaaaaaaaaaaaaaaaaaaaaaaaaaaaaaaaaaaaaaaaaaaaaaaaaaaaaaaaaaaaaaaaaaaaaaaaaaaaaaaaaaaaaaaaaaaaaaaaaaaaaaaaaaaaaaaaaaaaaaaaaaaaaaaaaaaaaaaaaaaaaaaaaaaaaaaaaaaaaaaaaaaaaaaaaaaaaaaaaaaaaaaaaaaaaaaaaaaaaaaaaaaaaaaaaaaaaaaaaaaaaaaaaaaaaaaaaaaaaaaaaaaaaaaaaaaaaaaaaaaaaaaaaaaaaaaaaaaaaaaaaaaaaaaaaaaaaaaaaaaaaaaaaaaaaaaaaaaaaaaaaaaaaaaaaaaaaaaaaaaaaaaaaaaaaaaaaaaaaaaaaaaaaaaaaaaaaaaaaaaaaaaaaaaaaaaaaaaaaaaaaaaaaaaaaaaaaaaaaaaaaaaaaaaaaaaaaaaaaaaaaaaaaaaaaaaaaaaaaaaaaaaaaaaaaaaaaaaaaaaaaaaaaaaaaaaaaaaaaaaaaaaaaaaaaaaaaaaaaaaaaaaaaaaaaaaaaaaaaaaaaaaaaaaaaaaaaaaaaaaaaaaaaaaaaaaaaaaaaaaaaaaaaaaaaaaaaaaaaaaaaaaaaaaaaaaaaaaaaaaaaaaaaaaaaaaaaaaaaaaaaaaaaaaaaaaaaaaaaaaaaaaaaaaaaaaaaaaaaaaaaaaaaaaaaaaaaaaaaaaaaaaaaaaaaaaaaaaaaaaaaaaaaaaaaaaaaaaaaaaaaaaaaaaaaaaaaaaaaaaaaaaaaaaaaaaaaaaaaaaaaaaaaaaaaaaaaaaaaaaaaaaaaaaaaaaaaaaaaaaaaaaaaaaaaaaaaaaaaaaaaaaaaaaaaaaaaaaaaaaaaaaaaaaaaaaaaaaaaaaaaaaaaaaaaaaaaaaaaaaaaaaaaaaaaaaaaaaaaaaaaaaaaaaaaaaaaaaaaaaaaaaaaaaaaaaaaaaaaaaaaaaaaaaaaaaaaaaaaaaaaaaaaaaaaaaaaaaaaaaaaaaaaaaaaaaaaaaaaaaaaaaaaaaaaaaaaaaaaaaaaaaaaaaaaaaaaaaaaaaaaaaaaaaaaaaaaaaaaaaaaaaaaaaaaaaaaaaaaaaaaaaaaaaaaaaaaaaaaaaaaaaaaaaaaaaaaaaaaaaaaaaaaaaaaaaaaaaaaaaaaaaaaaaaaaaaaaaaaaaaaaaaaaaaaaaaaaaaaaaaaaaaaaaaaaaaaaaaaaaaaaaaaaaaaaaaaaaaaaaaaaaaaaaaaaaaaaaaaaaaaaaaaaaaaaaaaaaaaaaaaaaaaaaaaaaaaaaaaaaaaaaaaaaaaaaaaaaaaaaaaaaaaaaaaaaaaaaaaaaaaaaaaaaaaaaaaaaaaaaaaaaaaaaaaaaaaaaaaaaaaaaaaaaaaaaaaaaaaaaaaaaaaaaaaaaaaaaaaaaaaaaaaaaaaaaaaaaaaaaaaaaaaaaaaaaaaaaaaaaaaaaaaaaaaaaaaaaaaaaaaaaaaaaaaaaaaaaaaaaaaaaaaaaaaaaaaaaaaaaaaaaaaaaaaaaaaaaaaaaaaaaaaaaaaaaaaaaaaaaaaaaaaaaaaaaaaaaaaaaaaaaaaaaaaaaaaaaaaaaaaaaaaaaaaaaaaaaaaaaaaaaaaaaaaaaaaaaaaaaaaaaaaaaaaaaaaaaaaaaaaaaaaaaaaaaaaaaaaaaaaaaaaaaaaaaaaaaaaaaaaaaaaaaaaaaaaaaaaaaaaaaaaaaaaaaaaaaaaaaaaaaaaaaaaaaaaaaaaaaaaaaaaaaaaaaaaaaaaaaaaaaaaaaaaaaaaaaaaaaaaaaaaaaaaaaaaaaaaaaaaaaaaaaaaaaaaaaaaaaaaaaaaaaaaaaaaaaaaaaaaaaaaaaaaaaaaaaaaaaaaaaaaaaaaaaaaaaaaaaaaaaaaaaaaaaaaaaaaaaaaaaaaaaaaaaaaaaaaaaaaaaaaaaaaaaaaaaaaaaaaaaaaaaaaaaaaaa

SEQ ID NO: 6597 - RNA, 13 nt, synthetic construct
  misc_feature 1..13: note = Description of Artificial Sequence: Synthetic oligonucleotide
  source 1..13: mol_type = other RNA
tagcaagttaaaa

SEQ ID NO: 6598 - RNA, 13 nt, synthetic construct
  misc_feature 1..13: note = Description of Artificial Sequence: Synthetic oligonucleotide
  source 1..13: mol_type = other RNA
tagcaagtttaaa

SEQ ID NO: 6599 - RNA, 47 nt, synthetic construct
  misc_feature 1..47: note = Description of Artificial Sequence: Synthetic oligonucleotide
  source 1..47: mol_type = other RNA
taaggctagtccgttatcaacttgaaaaagtggcaccgagtcggtgc

SEQ ID NO: 6600 - RNA, 51 nt, synthetic construct
  misc_feature 1..51: note = Description of Artificial Sequence: Synthetic oligonucleotide
  source 1..51: mol_type = other RNA
taaggctagtccgttatcaacttgaaaaagtggcaccgagtcggtgctttt

SEQ ID NO: 6601 - RNA, 76 nt, synthetic construct
  misc_feature 1..76: note = Description of Artificial Sequence: Synthetic oligonucleotide
  source 1..76: mol_type = other RNA
gttttagagctagaaatagcaagttaaaataaggctagtccgttatcaacttgaaaaagtggcaccgagtcggtgc

SEQ ID NO: 6602 - RNA, 76 nt, synthetic construct
  misc_feature 1..76: note = Description of Artificial Sequence: Synthetic oligonucleotide
  source 1..76: mol_type = other RNA
gtttaagagctagaaatagcaagtttaaataaggctagtccgttatcaacttgaaaaagtggcaccgagtcggtgc

SEQ ID NO: 6603 - RNA, 86 nt, synthetic construct
  misc_feature 1..86: note = Description of Artificial Sequence: Synthetic oligonucleotide
  source 1..86: mol_type = other RNA
gttttagagctatgctggaaacagcatagcaagttaaaataaggctagtccgttatcaacttgaaaaagtggcaccgagtcggtgc

SEQ ID NO: 6604 - RNA, 86 nt, synthetic construct
  misc_feature 1..86: note = Description of Artificial Sequence: Synthetic oligonucleotide
  source 1..86: mol_type = other RNA
gtttaagagctatgctggaaacagcatagcaagtttaaataaggctagtccgttatcaacttgaaaaagtggcaccgagtcggtgc

SEQ ID NO: 6605 - RNA, 17 nt, synthetic construct
  misc_feature 1..17: note = Description of Artificial Sequence: Synthetic oligonucleotide
  source 1..17: mol_type = other RNA
gttttagagctatgctg

SEQ ID NO: 6606 - RNA, 17 nt, synthetic construct
  misc_feature 1..17: note = Description of Artificial Sequence: Synthetic oligonucleotide
  source 1..17: mol_type = other RNA
gtttaagagctatgctg

SEQ ID NO: 6607 - RNA, 22 nt, synthetic construct
  misc_feature 1..22: note = Description of Artificial Sequence: Synthetic oligonucleotide
  source 1..22: mol_type = other RNA
gttttagagctatgctgttttg

SEQ ID NO: 6608 - RNA, 22 nt, synthetic construct
  misc_feature 1..22: note = Description of Artificial Sequence: Synthetic oligonucleotide
  source 1..22: mol_type = other RNA
gtttaagagctatgctgttttg

SEQ ID NO: 6609 - RNA, 65 nt, synthetic construct
  misc_feature 1..65: note = Description of Artificial Sequence: Synthetic oligonucleotide
  source 1..65: mol_type = other RNA
cagcatagcaagttaaaataaggctagtccgttatcaacttgaaaaagtggcaccgagtcggtgc

SEQ ID NO: 6610 - RNA, 65 nt, synthetic construct
  misc_feature 1..65: note = Description of Artificial Sequence: Synthetic oligonucleotide
  source 1..65: mol_type = other RNA
cagcatagcaagtttaaataaggctagtccgttatcaacttgaaaaagtggcaccgagtcggtgc

SEQ ID NO: 6611 - protein, 1368 aa, Streptococcus pyogenes [sequence omitted]

SEQ ID NO: 6612 - protein, 7 aa, Simian virus 40
PKKKRKV

SEQ ID NO: 6613 - protein, 16 aa, unidentified
  REGION 1..16: note = Description of Unknown: Nucleoplasmin bipartite NLS sequence
KRPAATKKAGQAKKKK

SEQ ID NO: 6614 - protein, 9 aa, unidentified
  REGION 1..9: note = Description of Unknown: C-myc NLS sequence
PAAKRVKLD

SEQ ID NO: 6615 - protein, 11 aa, unidentified
  REGION 1..11: note = Description of Unknown: C-myc NLS sequence
RQRRNELKRSP

SEQ ID NO: 6616 - protein, 38 aa, Homo sapiens
NQSSNFGPMKGGNFGGRSSGPYGGGGQYFAKPRNQGGY

SEQ ID NO: 6617 - protein, 42 aa, unidentified
  REGION 1..42: note = Description of Unknown: IBB domain from importin-alpha sequence
RMRIZFKNKGKDTAELRRRRVEVSVELRKAKKDEQILKRRNV

SEQ ID NO: 6618 - protein, 8 aa, unidentified
  REGION 1..8: note = Description of Unknown: Myoma T protein sequence
VSRKRPRP

SEQ ID NO: 6619 - protein, 8 aa, unidentified
  REGION 1..8: note = Description of Unknown: Myoma T protein sequence
PPKKARED

SEQ ID NO: 6620 - protein, 8 aa, Homo sapiens
PQPKKKPL

SEQ ID NO: 6621 - protein, 12 aa, Mus musculus
SALIKKKKKMAP

SEQ ID NO: 6622 - protein, 5 aa, unidentified
  source 1..5: note = Influenza virus
DRLRR

SEQ ID NO: 6623 - protein, 7 aa, unidentified
  source 1..7: note = Influenza virus
PKQKKRK

SEQ ID NO: 6624 - protein, 10 aa, Hepatitis delta virus
RKLKKKIKKL

SEQ ID NO: 6625 - protein, 10 aa, Mus musculus
REKKKFLKRR

SEQ ID NO: 6626 - protein, 20 aa, Homo sapiens
KRKGDEVDGVDEVAKKKSKK

SEQ ID NO: 6627 - protein, 17 aa, Homo sapiens
RKCLQAGMNLEARKTKK

SEQ ID NO: 6628 - DNA, 4107 bp, synthetic construct
  misc_feature 1..4107: note = Description of Artificial Sequence: Synthetic polynucleotide
  source 1..4107: mol_type = other DNA
atggataaaaagtacagcatcgggctggacatcggtacaaactcagtggggtgggccgtgattacggacgagtacaaggtaccctccaaaaaatttaaagtgctgggtaacacggacagacactctataaagaaaaatcttattggagccttgctgttcgactcaggcgagacagccgaagccacaaggttgaagcggaccgccaggaggcggtataccaggagaaagaaccgcatatgctacctgcaagaaatcttcagtaacgagatggcaaaggttgacgatagctttttccatcgcctggaagaatcctttcttgttgaggaagacaagaagcacgaacggcaccccatctttggcaatattgtcgacgaagtggcatatcacgaaaagtacccgactatctaccacctcaggaagaagctggtggactctaccgataaggcggacctcagacttatttatttggcactcgcccacatgattaaatttagaggacatttcttgatcgagggcgacctgaacccggacaacagtgacgtcgataagctgttcatccaacttgtgcagacctacaatcaactgttcgaagaaaaccctataaatgcttcaggagtcgacgctaaagcaatcctgtccgcgcgcctctcaaaatctagaagacttgagaatctgattgctcagttgcccggggaaaagaaaaatggattgtttggcaacctgatcgccctcagtctcggactgaccccaaatttcaaaagtaacttcgacctggccgaagacgctaagctccagctgtccaaggacacatacgatgacgacctcgacaatctgctggcccagattggggatcagtacgccgatctctttttggcagcaaagaacctgtccgacgccatcctgttgagcgatatcttgagagtgaacaccgaaattactaaagcaccccttagcgcatctatgatcaagcggtacgacgagcatcatcaggatctgaccctgctgaaggctcttgtgaggcaacagctccccgaaaaatacaaggaaatcttctttgaccagagcaaaaacggctacgctggctatatagatggtggggccagtcaggaggaattctataaattcatcaagcccattctcgagaaaatggacggcacagaggagttgctggtcaaacttaacagggaggacctgctgcggaagcagcggacctttgacaacgggtctatcccccaccagattcatctgggcgaactgcacgcaatcctgaggaggcaggaggatttttatccttttcttaaagataaccgcgagaaaatagaaaagattcttacattcaggatcccgtactacgtgggacctctcgcccggggcaattcacggtttgcctggatgacaaggaagtcagaggagactattacaccttggaacttcgaagaagtggtggacaagggtgcatctgcccagtctttcatcgagcggatgacaaattttgacaagaacctccctaatgagaaggtgctgcccaaacattctctgctctacgagtactttaccgtctacaatgaactgactaaagtcaagtacgtcaccgagggaatgaggaagccggcattccttagtggagaacagaagaaggcgattgtagacctgttgttcaagaccaacaggaaggtgactgtgaagcaacttaaagaagactactttaagaagatcgaatgttttgacagtgtggaaatttcaggggttgaagaccgcttcaatgcgtcattggggacttaccatgatcttctcaagatcataaaggacaaagacttcctggacaacgaagaaaatgaggatattctcgaagacatcgtcctcaccctgaccctgttcgaagacagggaaatgatagaagagcgcttgaaaacctatgcccacctcttcgacgataaagttatgaagcagctgaagcgcaggagatacacaggatggggaagattgtcaaggaagctgatcaatggaattagggataaacagagtggcaagaccatactggatttcctcaaatctgatggcttcgccaataggaacttcatgcaactgattcacgatgactctcttaccttcaaggaggacattcaaaaggctcaggtgagcgggcagggagactcccttcatgaacacatcgcgaatttggcaggttcccccgctattaaaaagggcatccttcaaactgtcaaggtggtggatgaattggtcaaggtaatgggcagacataagccagaaaatattgtgatcgagatggcccgcgaaaaccagaccacacagaagggccagaaaaatagtagagagcggatgaagaggatcgaggagggcatcaaagagctgggatctcagattctcaaagaacaccccgtagaaaacacacagctgcagaacgaaaaattgtacttgtactatctgcagaacggcagagacatgtacgtcgaccaagaacttgatattaatagactgtccgactatgacgtagaccatatcgtgccccagtccttcctgaaggacgactccattgataacaaagtcttgacaagaagcgacaagaacaggggtaaaagtgataatgtgcctagcgaggaggtggtgaaaaaaatgaagaactactggcgacagctgcttaatgcaaagctcattacacaacggaagttcgataatctgacgaaagcagagagaggtggcttgtctgagttggacaaggcagggtttattaagcggcagctggtggaaactaggcagatcacaaagcacgtggcgcagattttggacagccggatgaacacaaaatacgacgaaaatgataaactgatacgagaggtcaaagttatcacgctgaaaagcaagctggtgtccgattttcggaaagacttccagttctacaaagttcgcgagattaataactaccatcatgctcacgatgcgtacctgaacgctgttgtcgggaccgccttgataaagaagtacccaaagctggaatccgagttcgtatacggggattacaaagtgtacgatgtgaggaaaatgatagccaagtccgagcaggagattggaaaggccacagctaagtacttcttttattctaacatcatgaatttttttaagacggaaattaccctggccaacggagagatcagaaagcggccccttatagagacaaatggtgaaacaggtgaaatcgtctgggataagggcagggatttcgctactgtgaggaaggtgctgagtatgccacaggtaaatatcgtgaaaaaaaccgaagtacagaccggaggattttccaaggaaagcattttgcctaaaagaaactcagacaagctcatcgcccgcaagaaagattgggaccctaagaaatacgggggatttgactcacccaccgtagcctattctgtgctggtggtagctaaggtggaaaaaggaaagtctaagaagctgaagtccgtgaaggaactcttgggaatcactatcatggaaagatcatcctttgaaaagaaccctatcgatttcctggaggctaagggttacaaggaggtcaagaaagacctcatcattaaactgccaaaatactctctcttcgagctggaaaatggcaggaagagaatgttggccagcgccggagagctgcaaaagggaaacgagcttgctctgccctccaaatatgttaattttctctatctcgcttcccactatgaaaagctgaaagggtctcccgaagataacgagcagaagcagctgttcgtcgaacagcacaagcactatctggatgaaataatcgaacaaataagcgagttcagcaaaagggttatcctggcggatgctaatttggacaaagtactgtctgcttataacaagcaccgggataagcctattagggaacaagccgagaatataattcacctctttacactcacgaatctcggagcccccgccgccttcaaatactttgatacgactatcgaccggaaacggtataccagtaccaaagaggtcctcgatgccaccctcatccaccagtcaattactggcctgtacgaaacacggatcgacctctctcaactgggcggcgactag

SEQ ID NO: 6629 - protein, 5 aa, synthetic construct
  REGION 1..5: note = Description of Artificial Sequence: Synthetic peptide
GGGGS

SEQ ID NO: 6630 - protein, 230 aa, synthetic construct
  REGION 1..230: note = Description of Artificial Sequence: Synthetic polypeptide
ESKYGPPCPPCPAPEFLGGPSVFLFPPKPKDTLMISRTPEVTCVVVDVSQEDPEVQFNWYVDGVEVHNAKTKPREEQFNSTYRVVSVLTVLHQDWLNGKEYKCKVSNKGLPSSIEKTISKAKGQPREPQVYTLPPSQEEMTKNQVSLTCLVKGFYPSDIAVEWESNGQPENNYKTTPPVLDSDGSFFLYSRLTVDKSRWQEGNVFSCSVMHEALHNHYTQKSLSLSLGKM

SEQ ID NO: 6631 - DNA, 690 bp, synthetic construct
  misc_feature 1..690: note = Description of Artificial Sequence: Synthetic polynucleotide
  source 1..690: mol_type = other DNA
gagagcaagtacggccctccctgccccccttgccctgcccccgagttcctgggcggacccagcgtgttcctgttcccccccaagcccaaggacaccctgatgatcagccggacccccgaggtgacctgtgtggtggtggacgtgtcccaggaggaccccgaggtccagttcaactggtacgtggacggcgtggaggtgcacaacgccaagaccaagccccgggaggagcagttcaatagcacctaccgggtggtgtccgtgctgaccgtgctgcaccaggactggctgaacggcaaggaatacaagtgtaaggtgtccaacaagggcctgcccagcagcatcgagaaaaccatcagcaaggccaagggccagcctcgggagccccaggtgtacaccctgccccctagccaagaggagatgaccaagaaccaggtgtccctgacctgcctggtgaagggcttctaccccagcgacatcgccgtggagtgggagagcaacggccagcccgagaacaactacaagaccaccccccctgtgctggacagcgacggcagcttcttcctgtacagccggctgaccgtggacaagagccggtggcaggagggcaacgtctttagctgctccgtgatgcacgaggccctgcacaaccactacacccagaagagcctgagcctgtccctgggcaagatg

SEQ ID NO: 6632 - protein, 282 aa, synthetic construct
  REGION 1..282: note = Description of Artificial Sequence: Synthetic polypeptide
RWPESPKAQASSVPTAQPQAEGSLAKATTAPATTRNTGRGGEEKKKEKEKEEQEERETKTPECPSHTQPLGVYLLTPAVQDLWLRDKATFTCFVVGSDLKDAHLTWEVAGKVPTGGVEEGLLERHSNGSQSQHSRLTLPRSLWNAGTSVTCTLNHPSLPPQRLMALREPAAQAPVKLSLNLLASSDPPEAASWLLCEVSGFSPPNILLMWLEDQREVNTSGFAPARPPPQPGSTTFWAWSVLRVPAPPSPQPATYTCVVSHEDSRTLLNASRSLEVSYVTDH

SEQ ID NO: 6633 - DNA, 847 bp, synthetic construct
  misc_feature 1..847: note = Description of Artificial Sequence: Synthetic polynucleotide
  source 1..847: mol_type = other DNA
aggtggcccgaaagtcccaaggcccaggcatctagtgttcctactgcacagccccaggcagaaggcagcctagccaaagctactactgcacctgccactacgcgcaatactggccgtggcggggaggagaagaaaaaggagaaagagaaagaagaacaggaagagagggagaccaagacccctgaatgtccatcccatacccagccgctgggcgtctatctcttgactcccgcagtacaggacttgtggcttagagataaggccacctttacatgtttcgtcgtgggctctgacctgaaggatgcccatttgacttgggaggttgccggaaaggtacccacagggggggttgaggaagggttgctggagcgccattccaatggctctcagagccagcactcaagactcacccttccgagatccctgtggaacgccgggacctctgtcacatgtactctaaatcatcctagcctgcccccacagcgtctgatggcccttagagagccagccgcccaggcaccagttaagcttagcctgaatctgctcgccagtagtgatcccccagaggccgccagctggctcttatgcgaagtgtccggctttagcccgcccaacatcttgctcatgtggctggaggaccagcgagaagtgaacaccagcggcttcgctccagcccggcccccaccccagccgggttctaccacattctgggcctggagtgtcttaagggtcccagcaccacctagcccccagccagccacatacacctgtgttgtgtcccatgaagatagcaggaccctgctaaatgcttctaggagtctggaggtttcctacgtgactgaccatt

SEQ ID NO: 6634 - protein, 10 aa, synthetic construct
  REGION 1..10: note = Description of Artificial Sequence: Synthetic peptide
GGGGSGGGGS

SEQ ID NO: 6635 - DNA, 30 bp, synthetic construct
  misc_feature 1..30: note = Description of Artificial Sequence: Synthetic oligonucleotide
  source 1..30: mol_type = other DNA
ggtggcggaggttctggaggtggaggttcc

SEQ ID NO: 6636 - protein, 48 aa, synthetic construct
  REGION 1..48: note = Description of Artificial Sequence: Synthetic polypeptide
QRRKYRSNKGESPVEPAEPCRYSCPREEEGSTIPIQEDYRKPEPACSP

SEQ ID NO: 6637 - DNA, 123 bp, synthetic construct
  misc_feature 1..123: note = Description of Artificial Sequence: Synthetic polynucleotide
  source 1..123: mol_type = other DNA
aggagtaagaggagcaggctcctgcacagtgactacatgaacatgactccccgccgccccgggcccacccgcaagcattaccagccctatgccccaccacgcgacttcgcagcctatcgctcc

SEQ ID NO: 6638 - DNA, 2000 bp, synthetic construct
  misc_difference 1..2000: note = misc_feature - This sequence may encompass 50-2000 nucleotides
  misc_feature 1..2000: note = Description of Artificial Sequence: Synthetic polynucleotide
  source 1..2000: mol_type = other DNA
aaaaaaaaaaaaaaaaaaaaaaaaaaaaaaaaaaaaaaaaaaaaaaaaaaaaaaaaaaaaaaaaaaaaaaaaaaaaaaaaaaaaaaaaaaaaaaaaaaaaaaaaaaaaaaaaaaaaaaaaaaaaaaaaaaaaaaaaaaaaaaaaaaaaaaaaaaaaaaaaaaaaaaaaaaaaaaaaaaaaaaaaaaaaaaaaaaaaaaaaaaaaaaaaaaaaaaaaaaaaaaaaaaaaaaaaaaaaaaaaaaaaaaaaaaaaaaaaaaaaaaaaaaaaaaaaaaaaaaaaaaaaaaaaaaaaaaaaaaaaaaaaaaaaaaaaaaaaaaaaaaaaaaaaaaaaaaaaaaaaaaaaaaaaaaaaaaaaaaaaaaaaaaaaaaaaaaaaaaaaaaaaaaaaaaaaaaaaaaaaaaaaaaaaaaaaaaaaaaaaaaaaaaaaaaaaaaaaaaaaaaaaaaaaaaaaaaaaaaaaaaaaaaaaaaaaaaaaaaaaaaaaaaaaaaaaaaaaaaaaaaaaaaaaaaaaaaaaaaaaaaaaaaaaaaaaaaaaaaaaaaaaaaaaaaaaaaaaaaaaaaaaaaaaaaaaaaaaaaaaaaaaaaaaaaaaaaaaaaaaaaaaaaaaaaaaaaaaaaaaaaaaaaaaaaaaaaaaaaaaaaaaaaaaaaaaaaaaaaaaaaaaaaaaaaaaaaaaaaaaaaaaaaaaaaaaaaaaaaaaaaaaaaaaaaaaaaaaaaaaaaaaaaaaaaaaaaaaaaaaaaaaaaaaaaaaaaaaaaaaaaaaaaaaaaaaaaaaaaaaaaaaaaaaaaaaaaaaaaaaaaaaaaaaaaaaaaaaaaaaaaaaaaaaaaaaaaaaaaaaaaaaaaaaaaaaaaaaaaaaaaaaaaaaaaaaaaaaaaaaaaaaaaaaaaaaaaaaaaaaaaaaaaaaaaaaaaaaaaaaaaaaaaaaaaaaaaaaaaaaaaaaaaaaaaaaaaaaaaaaaaaaaaaaaaaaaaaaaaaaaaaaaaaaaaaaaaaaaaaaaaaaaaaaaaaaaaaaaaaaaaaaaaaaaaaaaaaaaaaaaaaaaaaaaaaaaaaaaaaaaaaaaaaaaaaaaaaaaaaaaaaaaaaaaaaaaaaaaaaaaaaaaaaaaaaaaaaaaaaaaaaaaaaaaaaaaaaaaaaaaaaaaaaaaaaaaaaaaaaaaaaaaaaaaaaaaaaaaaaaaaaaaaaaaaaaaaaaaaaaaaaaaaaaaaaaaaaaaaaaaaaaaaaaaaaaaaaaaaaaaaaaaaaaaaaaaaaaaaaaaaaaaaaaaaaaaaaaaaaaaaaaaaaaaaaaaaaaaaaaaaaaaaaaaaaaaaaaaaaaaaaaaaaaaaaaaaaaaaaaaaaaaaaaaaaaaaaaaaaaaaaaaaaaaaaaaaaaaaaaaaaaaaaaaaaaaaaaaaaaaaaaaaaaaaaaaaaaaaaaaaaaaaaaaaaaaaaaaaaaaaaaaaaaaaaaaaaaaaaaaaaaaaaaaaaaaaaaaaaaaaaaaaaaaaaaaaaaaaaaaaaaaaaaaaaaaaaaaaaaaaaaaaaaaaaaaaaaaaaaaaaaaaaaaaaaaaaaaaaaaaaaaaaaaaaaaaaaaaaaaaaaaaaaaaaaaaaaaaaaaaaaaaaaaaaaaaaaaaaaaaaaaaaaaaaaaaaaaaaaaaaaaaaaaaaaaaaaaaaaaaaaaaaaaaaaaaaaaaaaaaaaaaaaaaaaaaaaaaaaaaaaaaaaaaaaaaaaaaaaaaaaaaaaaaaaaaaaaaaaaaaaaaaaaaaaaaaaaaaaaaaaaaaaaaaaaaaaaaaaaaaaaaaaaaaaaaaaaaaaaaaaaaaaaaaaaaaaaaaaaaaaaaaaaaaaaaaaaaaaaaaaaaaaaaaaaaaaaaaaaaaaaaaaaaaaaaaaaaaaaaaaaaaaaaaaaaaaaaaaaaaaaaaaaaaaaaaaaaaaaaaaaaaaaaaaaaaaaaaaaaaaaaaaaaaaaaaaaaaaaaaaaaaaaaaaaaaaaaaaaaaaaaaaaaaaaaaaaaaa

SEQ ID NO: 6639 - DNA, 1184 bp, synthetic construct
  misc_feature 1..1184: note = Description of Artificial Sequence: Synthetic polynucleotide
  source 1..1184: mol_type = other DNA
cgtgaggctccggtgcccgtcagtgggcagagcgcacatcgcccacagtccccgagaagttggggggaggggtcggcaattgaaccggtgcctagagaaggtggcgcggggtaaactgggaaagtgatgtcgtgtactggctccgcctttttcccgagggtgggggagaaccgtatataagtgcagtagtcgccgtgaacgttctttttcgcaacgggtttgccgccagaacacaggtaagtgccgtgtgtggttcccgcgggcctggcctctttacgggttatggcccttgcgtgccttgaattacttccacctggctgcagtacgtgattcttgatcccgagcttcgggttggaagtgggtgggagagttcgaggccttgcgcttaaggagccccttcgcctcgtgcttgagttgaggcctggcctgggcgctggggccgccgcgtgcgaatctggtggcaccttcgcgcctgtctcgctgctttcgataagtctctagccatttaaaatttttgatgacctgctgcgacgctttttttctggcaagatagtcttgtaaatgcgggccaagatctgcacactggtatttcggtttttggggccgcgggcggcgacggggcccgtgcgtcccagcgcacatgttcggcgaggcggggcctgcgagcgcggccaccgagaatcggacgggggtagtctcaagctggccggcctgctctggtgcctggcctcgcgccgccgtgtatcgccccgccctgggcggcaaggctggcccggtcggcaccagttgcgtgagcggaaagatggccgcttcccggccctgctgcagggagctcaaaatggaggacgcggcgctcgggagagcgggcgggtgagtcacccacacaaaggaaaagggcctttccgtcctcagccgtcgcttcatgtgactccacggagtaccgggcgccgtccaggcacctcgattagttctcgagcttttggagtacgtcgtctttaggttggggggaggggttttatgcgatggagtttccccacactgagtgggtggagactgaagttaggccagcttggcacttgatgtaattctccttggaatttgccctttttgagtttggatcttggttcattctcaagcctcagacagtggttcaaagtttttttcttccatttcaggtgtcgtga

SEQ ID NO: 6640 - protein, 21 aa, synthetic construct
  REGION 1..21: note = Description of Artificial Sequence: Synthetic peptide
MALPVTALLLPLALLLHAARP

SEQ ID NO: 6641 - DNA, 63 bp, synthetic construct
  misc_feature 1..63: note = Description of Artificial Sequence: Synthetic oligonucleotide
  source 1..63: mol_type = other DNA
atggccctgcctgtgacagccctgctgctgcctctggctctgctgctgcatgccgctagaccc

SEQ ID NO: 6642 - protein, 45 aa, synthetic construct
  REGION 1..45: note = Description of Artificial Sequence: Synthetic polypeptide
TTTPAPRPPTPAPTIASQPLSLRPEACRPAAGGAVHTRGLDFACD

SEQ ID NO: 6643 - DNA, 135 bp, synthetic construct
  misc_feature 1..135: note = Description of Artificial Sequence: Synthetic polynucleotide
  source 1..135: mol_type = other DNA
accacgacgccagcgccgcgaccaccaacaccggcgcccaccatcgcgtcgcagcccctgtccctgcgcccagaggcgtgccggccagcggcggggggcgcagtgcacacgagggggctggacttcgcctgtgat

SEQ ID NO: 6644 - protein, 24 aa, synthetic construct
  REGION 1..24: note = Description of Artificial Sequence: Synthetic peptide
IYIWAPLAGTCGVLLLSLVITLYC

SEQ ID NO: 6645 - DNA, 72 bp, synthetic construct
  misc_feature 1..72: note = Description of Artificial Sequence: Synthetic oligonucleotide
  source 1..72: mol_type = other DNA
atctacatctgggcgcccttggccgggacttgtggggtccttctcctgtcactggttatcaccctttactgc

SEQ ID NO: 6646 - protein, 42 aa, synthetic construct
  REGION 1..42: note = Description of Artificial Sequence: Synthetic polypeptide
KRGRKKLLYIFKQPFMRPVQTTQEEDGCSCRFPEEEEGGCEL

SEQ ID NO: 6647 - DNA, 126 bp, synthetic construct
  misc_feature 1..126: note = Description of Artificial Sequence: Synthetic polynucleotide
  source 1..126: mol_type = other DNA
aaacggggcagaaagaaactcctgtatatattcaaacaaccatttatgagaccagtacaaactactcaagaggaagatggctgtagctgccgatttccagaagaagaagaaggaggatgtgaactg

SEQ ID NO: 6648 - protein, 112 aa, synthetic construct
  REGION 1..112: note = Description of Artificial Sequence: Synthetic polypeptide
RVKFSRSADAPAYKQGQNQLYNELNLGRREEYDVLDKRRGRDPEMGGKPRRKNPQEGLYNELQKDKMAEAYSEIGMKGERRRGKGHDGLYQGLSTATKDTYDALHMQALPPR

SEQ ID NO: 6649 - DNA, 336 bp, synthetic construct
  misc_feature 1..336: note = Description of Artificial Sequence: Synthetic polynucleotide
  source 1..336: mol_type = other DNA
agagtgaagttcagcaggagcgcagacgcccccgcgtacaagcagggccagaaccagctctataacgagctcaatctaggacgaagagaggagtacgatgttttggacaagagacgtggccgggaccctgagatggggggaaagccgagaaggaagaaccctcaggaaggcctgtacaatgaactgcagaaagataagatggcggaggcctacagtgagattgggatgaaaggcgagcgccggaggggcaaggggcacgatggcctttaccagggtctcagtacagccaccaaggacacctacgacgcccttcacatgcaggccctgccccctcgc

SEQ ID NO: 6650 - protein, 112 aa, synthetic construct
  REGION 1..112: note = Description of Artificial Sequence: Synthetic polypeptide
RVKFSRSADAPAYQQGQNQLYNELNLGRREEYDVLDKRRGRDPEMGGKPRRKNPQEGLYNELQKDKMAEAYSEIGMKGERRRGKGHDGLYQGLSTATKDTYDALHMQALPPR

SEQ ID NO: 6651 - DNA, 336 bp, synthetic construct
  misc_feature 1..336: note = Description of Artificial Sequence: Synthetic polynucleotide
  source 1..336: mol_type = other DNA
agagtgaagttcagcaggagcgcagacgcccccgcgtaccagcagggccagaaccagctctataacgagctcaatctaggacgaagagaggagtacgatgttttggacaagagacgtggccgggaccctgagatggggggaaagccgagaaggaagaaccctcaggaaggcctgtacaatgaactgcagaaagataagatggcggaggcctacagtgagattgggatgaaaggcgagcgccggaggggcaaggggcacgatggcctttaccagggtctcagtacagccaccaaggacacctacgacgcccttcacatgcaggccctgccccctcgc

SEQ ID NO: 6652 - protein, 150 aa, synthetic construct [sequence omitted]

SEQ ID NO: 6653 - DNA, 450 bp, synthetic construct
  misc_feature 1..450: note = Description of Artificial Sequence: Synthetic polynucleotide
  source 1..450: mol_type = other DNA
cccggatggtttctggactctccggatcgcccgtggaatcccccaaccttctcaccggcactcttggttgtgactgagggcgataatgcgaccttcacgtgctcgttctccaacacctccgaatcattcgtgctgaactggtaccgcatgagcccgtcaaaccagaccgacaagctcgccgcgtttccggaagatcggtcgcaaccgggacaggattgtcggttccgcgtgactcaactgccgaatggcagagacttccacatgagcgtggtccgcgctaggcgaaacgactccgggacctacctgtgcggagccatctcgctggcgcctaaggcccaaatcaaagagagcttgagggccgaactgagagtgaccgagcgcagagctgaggtgccaactgcacatccatccccatcgcctcggcctgcggggcagtttcagaccctggtc

SEQ ID NO: 6654 - protein, 394 aa, synthetic construct
  REGION 1..394: note = Description of Artificial Sequence: Synthetic polypeptide
MALPVTALLLPLALLLHAARPPGWFLDSPDRPWNPPTFSPALLVVTEGDNATFTCSFSNTSESFVLNWYRMSPSNQTDKLAAFPEDRSQPGQDCRFRVTQLPNGRDFHMSVVRARRNDSGTYLCGAISLAPKAQIKESLRAELRVTERRAEVPTAHPSPSPRPAGQFQTLVTTTPAPRPPTPAPTIASQPLSLRPEACRPAAGGAVHTRGLDFACDIYIWAPLAGTCGVLLLSLVITLYCKRGRKKLLYIFKQPFMRPVQTTQEEDGCSCRFPEEEEGGCELRVKFSRSADAPAYKQGQNQLYNELNLGRREEYDVLDKRRGRDPEMGGKPRRKNPQEGLYNELQKDKMAEAYSEIGMKGERRRGKGHDGLYQGLSTATKDTYDALHMQALPPR

SEQ ID NO: 6655 - DNA, 1182 bp, synthetic construct
  misc_feature 1..1182: note = Description of Artificial Sequence: Synthetic polynucleotide
  source 1..1182: mol_type = other DNA
atggccctccctgtcactgccctgcttctccccctcgcactcctgctccacgccgctagaccacccggatggtttctggactctccggatcgcccgtggaatcccccaaccttctcaccggcactcttggttgtgactgagggcgataatgcgaccttcacgtgctcgttctccaacacctccgaatcattcgtgctgaactggtaccgcatgagcccgtcaaaccagaccgacaagctcgccgcgtttccggaagatcggtcgcaaccgggacaggattgtcggttccgcgtgactcaactgccgaatggcagagacttccacatgagcgtggtccgcgctaggcgaaacgactccgggacctacctgtgcggagccatctcgctggcgcctaaggcccaaatcaaagagagcttgagggccgaactgagagtgaccgagcgcagagctgaggtgccaactgcacatccatccccatcgcctcggcctgcggggcagtttcagaccctggtcacgaccactccggcgccgcgcccaccgactccggccccaactatcgcgagccagcccctgtcgctgaggccggaagcatgccgccctgccgccggaggtgctgtgcatacccggggattggacttcgcatgcgacatctacatttgggctcctctcgccggaacttgtggcgtgctccttctgtccctggtcatcaccctgtactgcaagcggggtcggaaaaagcttctgtacattttcaagcagcccttcatgaggcccgtgcaaaccacccaggaggaggacggttgctcctgccggttccccgaagaggaagaaggaggttgcgagctgcgcgtgaagttctcccggagcgccgacgcccccgcctataagcagggccagaaccagctgtacaacgaactgaacctgggacggcgggaagagtacgatgtgctggacaagcggcgcggccgggaccccgaaatgggcgggaagcctagaagaaagaaccctcaggaaggcctgtataacgagctgcagaaggacaagatggccgaggcctactccgaaattgggatgaagggagagcggcggaggggaaaggggcacgacggcctgtaccaaggactgtccaccgccaccaaggacacatacgatgccctgcacatgcaggcccttccccctcgc

SEQ ID NO: 6656 - protein, 373 aa, synthetic construct
  REGION 1..373: note = Description of Artificial Sequence: Synthetic polypeptide
PGWFLDSPDRPWNPPTFSPALLVVTEGDNATFTCSFSNTSESFVLNWYRMSPSNQTDKLAAFPEDRSQPGQDCRFRVTQLPNGRDFHMSVVRARRNDSGTYLCGAISLAPKAQIKESLRAELRVTERRAEVPTAHPSPSPRPAGQFQTLVTTTPAPRPPTPAPTIASQPLSLRPEACRPAAGGAVHTRGLDFACDIYIWAPLAGTCGVLLLSLVITLYCKRGRKKLLYIFKQPFMRPVQTTQEEDGCSCRFPEEEEGGCELRVKFSRSADAPAYKQGQNQLYNELNLGRREEYDVLDKRRGRDPEMGGKPRRKNPQEGLYNELQKDKMAEAYSEIGMKGERRRGKGHDGLYQGLSTATKDTYDALHMQALPPR

SEQ ID NO: 6657 - RNA, 20 nt, Homo sapiens
  source 1..20: mol_type = unassigned RNA
tgcagatcccacaggcgccc

SEQ ID NO: 6658 - skipped

SEQ ID NO: 6659 - protein, 4 aa, synthetic construct
  REGION 1..4: note = Description of Artificial Sequence: Synthetic peptide
RGDS

SEQ ID NO: 6660 - RNA, 74 nt, synthetic construct
  misc_feature 1..74: note = Description of Artificial Sequence: Synthetic oligonucleotide
  source 1..74: mol_type = other RNA
aacagcatagcaagttaaaataaggctagtccgttatcaacttgaaaaagtggcaccgagtcggtgcttttttt

SEQ ID NO: 6661 - RNA, 74 nt, synthetic construct
  misc_feature 1..74: note = Description of Artificial Sequence: Synthetic oligonucleotide
  source 1..74: mol_type = other RNA
aacagcatagcaagtttaaataaggctagtccgttatcaacttgaaaaagtggcaccgagtcggtgcttttttt

SEQ ID NO: 6662 - RNA, 20 nt, Homo sapiens
  source 1..20: mol_type = unassigned RNA
cgcacgcagggctgggcgtg

SEQ ID NO: 6663 - RNA, 20 nt, Homo sapiens
  source 1..20: mol_type = unassigned RNA
gcacgcagggctgggcgtga

SEQ ID NO: 6664 - RNA, 20 nt, Homo sapiens
  source 1..20: mol_type = unassigned RNA
cacgcagggctgggcgtgag

SEQ ID NO: 6665 - RNA, 20 nt, Homo sapiens
  source 1..20: mol_type = unassigned RNA
acgcagggctgggcgtgagg

SEQ ID NO: 6666 - RNA, 20 nt, Homo sapiens
  source 1..20: mol_type = unassigned RNA
gagggggcgtgcgcgtgcgc

SEQ ID NO: 6667 - RNA, 20 nt, Homo sapiens
  source 1..20: mol_type = unassigned RNA
cgtgcgcaggcgacgcgccg

SEQ ID NO: 6668 - RNA, 20 nt, Homo sapiens
  source 1..20: mol_type = unassigned RNA
aggcgacgcgccgaggtact

SEQ ID NO: 6669 - RNA, 20 nt, Homo sapiens
  source 1..20: mol_type = unassigned RNA
cacggctctgcctagtacct

SEQ ID NO: 6670 - RNA, 20 nt, Homo sapiens
  source 1..20: mol_type = unassigned RNA
cgaggtactaggcagagccg

SEQ ID NO: 6671 - RNA, 20 nt, Homo sapiens
  source 1..20: mol_type = unassigned RNA
agagccgtggaaccgccgcc

SEQ ID NO: 6672 - RNA, 20 nt, Homo sapiens
  source 1..20: mol_type = unassigned RNA
gcgacctggcggcggttcca

SEQ ID NO: 6673 - RNA, 20 nt, Homo sapiens
  source 1..20: mol_type = unassigned RNA
aaccgccgccaggtcgctgt

SEQ ID NO: 6674 - RNA, 20 nt, Homo sapiens
  source 1..20: mol_type = unassigned RNA
gaccaacagcgacctggcgg

SEQ ID NO: 6675 - RNA, 20 nt, Homo sapiens
  source 1..20: mol_type = unassigned RNA
gtggaccaacagcgacctgg

SEQ ID NO: 6676 - RNA, 20 nt, Homo sapiens
  source 1..20: mol_type = unassigned RNA
ggcgtggaccaacagcgacc

SEQ ID NO: 6677 - RNA, 20 nt, Homo sapiens
  source 1..20: mol_type = unassigned RNA
gggcggcgcgacgggcggcg

SEQ ID NO: 6678 - RNA, 20 nt, Homo sapiens
  source 1..20: mol_type = unassigned RNA
cgggcgggcggcgcgacggg

SEQ ID NO: 6679 - RNA, 20 nt, Homo sapiens
  source 1..20: mol_type = unassigned RNA
gagcgggcgggcggcgcgac

SEQ ID NO: 6680 - RNA, 20 nt, Homo sapiens
  source 1..20: mol_type = unassigned RNA
tgagcgggcgggcggcgcga

SEQ ID NO: 6681 - RNA, 20 nt, Homo sapiens
  source 1..20: mol_type = unassigned RNA
gcggacgctgagcgggcggg

SEQ ID NO: 6682 - RNA, 20 nt, Homo sapiens
  source 1..20: mol_type = unassigned RNA
gcggcggacgctgagcgggc

SEQ ID NO: 6683 - RNA, 20 nt, Homo sapiens
  source 1..20: mol_type = unassigned RNA
ggcggcggacgctgagcggg

SEQ ID NO: 6684 - RNA, 20 nt, Homo sapiens
  source 1..20: mol_type = unassigned RNA
ggcggcggcggacgctgagc

SEQ ID NO: 6685 - RNA, 20 nt, Homo sapiens
  source 1..20: mol_type = unassigned RNA
tggcggcggcggacgctgag

SEQ ID NO: 6686 - RNA, 20 nt, Homo sapiens
  source 1..20: mol_type = unassigned RNA
ctcagcgtccgccgccgcca

SEQ ID NO: 6687 - RNA, 20 nt, Homo sapiens
  source 1..20: mol_type = unassigned RNA
tcagcgtccgccgccgccat

SEQ ID NO: 6688 - RNA, 20 nt, Homo sapiens
  source 1..20: mol_type = unassigned RNA
ctgcactcccatggcggcgg

SEQ ID NO: 6689 - RNA, 20 nt, Homo sapiens
  source 1..20: mol_type = unassigned RNA
cgccgccgccatgggagtgc

SEQ ID NO: 6690 - RNA, 20 nt, Homo sapiens
  source 1..20: mol_type = unassigned RNA
cacctgcactcccatggcgg

SEQ ID NO: 6691 - RNA, 20 nt, Homo sapiens
  source 1..20: mol_type = unassigned RNA
cgccgccatgggagtgcagg

SEQ ID NO: 6692 - RNA, 20 nt, Homo sapiens
  source 1..20: mol_type = unassigned RNA
ttccacctgcactcccatgg

SEQ ID NO: 6693 - RNA, 20 nt, Homo sapiens
  source 1..20: mol_type = unassigned RNA
ggtttccacctgcactccca

SEQ ID NO: 6694 - RNA, 20 nt, Homo sapiens
  source 1..20: mol_type = unassigned RNA
caggtggaaaccatctcccc

SEQ ID NO: 6695 - RNA, 20 nt, Homo sapiens
  source 1..20: mol_type = unassigned RNA
ctcaccgtctcctggggaga

SEQ ID NO: 6696 - RNA, 20 nt, Homo sapiens
  source 1..20: mol_type = unassigned RNA
ccactactcaccgtctcctg

SEQ ID NO: 6697 - RNA, 20 nt, Homo sapiens
  source 1..20: mol_type = unassigned RNA
gccactactcaccgtctcct

SEQ ID NO: 6698 - RNA, 20 nt, Homo sapiens
  source 1..20: mol_type = unassigned RNA
cgccactactcaccgtctcc

SEQ ID NO: 6699 - RNA, 20 nt, Homo sapiens
  source 1..20: mol_type = unassigned RNA
tgcccgtctctgtctcctca

SEQ ID NO: 6700 - RNA, 20 nt, Homo sapiens
  source 1..20: mol_type = unassigned RNA
gggcgcaccttccccaagcg

SEQ ID NO: 6701 - RNA, 20 nt, Homo sapiens
  source 1..20: mol_type = unassigned RNA
ggtctggccgcgcttgggga

SEQ ID NO: 6702 - RNA, 20 nt, Homo sapiens
  source 1..20: mol_type = unassigned RNA
cgcaggtctggccgcgcttg

SEQ ID NO: 6703 - RNA, 20 nt, Homo sapiens
  source 1..20: mol_type = unassigned RNA
acgcaggtctggccgcgctt

SEQ ID NO: 6704 - RNA, 20 nt, Homo sapiens
  source 1..20: mol_type = unassigned RNA
cacgcaggtctggccgcgct

SEQ ID NO: 6705 - RNA, 20 nt, Homo sapiens
  source 1..20: mol_type = unassigned RNA
caagcgcggccagacctgcg

SEQ ID NO: 6706 - RNA, 20 nt, Homo sapiens
  source 1..20: mol_type = unassigned RNA
tgtagtgcaccacgcaggtc

SEQ ID NO: 6707 - RNA, 20 nt, Homo sapiens
  source 1..20: mol_type = unassigned RNA
accggtgtagtgcaccacgc

SEQ ID NO: 6708 - RNA, 20 nt, Homo sapiens
  source 1..20: mol_type = unassigned RNA
ccgctgggcccccgactcac

SEQ ID NO: 6709 - RNA, 20 nt, Homo sapiens
  source 1..20: mol_type = unassigned RNA
ttacagtcgtctttttcaca

SEQ ID NO: 6710 - RNA, 20 nt, Homo sapiens
  source 1..20: mol_type = unassigned RNA
ttcacagggatgcttgaaga

SEQ ID NO: 6711 - RNA, 20 nt, Homo sapiens
  source 1..20: mol_type = unassigned RNA
gaaagaaatttgattcctcc

SEQ ID NO: 6712 - RNA, 20 nt, Homo sapiens
  source 1..20: mol_type = unassigned RNA
aaagaaatttgattcctccc

SEQ ID NO: 6713 - RNA, 20 nt, Homo sapiens
  source 1..20: mol_type = unassigned RNA
gggcttgtttctgtcccggg

SEQ ID NO: 6714 - RNA, 20 nt, Homo sapiens
  source 1..20: mol_type = unassigned RNA
aaagggcttgtttctgtccc

SEQ ID NO: 6715 - RNA, 20 nt, Homo sapiens
  source 1..20: mol_type = unassigned RNA
taaagggcttgtttctgtcc

SEQ ID NO: 6716 - RNA, 20 nt, Homo sapiens
  source 1..20: mol_type = unassigned RNA
aagccctttaagtttatgct

SEQ ID NO: 6717 - RNA, 20 nt, Homo sapiens
  source 1..20: mol_type = unassigned RNA
ttgcctagcataaacttaaa

SEQ ID NO: 6718 - RNA, 20 nt, Homo sapiens
  source 1..20: mol_type = unassigned RNA
cttgcctagcataaacttaa

SEQ ID NO: 6719 - RNA, 20 nt, Homo sapiens
  source 1..20: mol_type = unassigned RNA
taagtttatgctaggcaagc

SEQ ID NO: 6720 - RNA, 20 nt, Homo sapiens
  source 1..20: mol_type = unassigned RNA
gtttatgctaggcaagcagg

SEQ ID NO: 6721 - RNA, 20 nt, Homo sapiens
  source 1..20: mol_type = unassigned RNA
ggcaagcaggaggtgatccg

SEQ ID NO: 6722 - RNA, 20 nt, Homo sapiens
  source 1..20: mol_type = unassigned RNA
agcaggaggtgatccgaggc

SEQ ID NO: 6723 - RNA, 20 nt, Homo sapiens
  source 1..20: mol_type = unassigned RNA
gcaggaggtgatccgaggct

SEQ ID NO: 6724 - RNA, 20 nt, Homo sapiens
  source 1..20: mol_type = unassigned RNA
gtgatccgaggctgggaaga

SEQ ID NO: 6725 - RNA, 20 nt, Homo sapiens
  source 1..20: mol_type = unassigned RNA
tgatccgaggctgggaagaa

SEQ ID NO: 6726 - RNA, 20 nt, Homo sapiens
  source 1..20: mol_type = unassigned RNA
gatccgaggctgggaagaag

SEQ ID NO: 6727 - RNA, 20 nt, Homo sapiens
  source 1..20: mol_type = unassigned RNA
caaccccttcttcccagcct

SEQ ID NO: 6728 - RNA, 20 nt, Homo sapiens
  source 1..20: mol_type = unassigned RNA
acaaatgagagagcatacct

SEQ ID NO: 6729 - RNA, 20 nt, Homo sapiens
  source 1..20: mol_type = unassigned RNA
aacaaatgagagagcatacc

SEQ ID NO: 6730 - RNA, 20 nt, Homo sapiens
  source 1..20: mol_type = unassigned RNA
gttcttttcacagatgagtg

SEQ ID NO: 6731 - RNA, 20 nt, Homo sapiens
  source 1..20: mol_type = unassigned RNA
ttcttttcacagatgagtgt

SEQ ID NO: 6732 - RNA, 20 nt, Homo sapiens
  source 1..20: mol_type = unassigned RNA
atctggagatatagtcagtt

SEQ ID NO: 6733 - RNA, 20 nt, Homo sapiens
  source 1..20: mol_type = unassigned RNA
atatctccagattatgccta

SEQ ID NO: 6734 - RNA, 20 nt, Homo sapiens
  source 1..20: mol_type = unassigned RNA
gtggcaccataggcataatc

SEQ ID NO: 6735 - RNA, 20 nt, Homo sapiens
  source 1..20: mol_type = unassigned RNA
gattatgcctatggtgccac

SEQ ID NO: 6736 - RNA, 20 nt, Homo sapiens
  source 1..20: mol_type = unassigned RNA
attatgcctatggtgccact

SEQ ID NO: 6737 - RNA, 20 nt, Homo sapiens
  source 1..20: mol_type = unassigned RNA
tgggtgcccagtggcaccat

SEQ ID NO: 6738 - RNA, 20 nt, Homo sapiens
  source 1..20: mol_type = unassigned RNA
tatggtgccactgggcaccc

SEQ ID NO: 6739 - RNA, 20 nt, Homo sapiens
  source 1..20: mol_type = unassigned RNA
gatgatgcctgggtgcccag

SEQ ID NO: 6740 - RNA, 20 nt, Homo sapiens
  source 1..20: mol_type = unassigned RNA
catgtggtgggatgatgcct

SEQ ID NO: 6741 - RNA, 20 nt, Homo sapiens
  source 1..20: mol_type = unassigned RNA
gcatgtggtgggatgatgcc

SEQ ID NO: 6742 - RNA, 20 nt, Homo sapiens
  source 1..20: mol_type = unassigned RNA
agacgagagtggcatgtggt

SEQ ID NO: 6743 - RNA, 20 nt, Homo sapiens
  source 1..20: mol_type = unassigned RNA
aagacgagagtggcatgtgg

SEQ ID NO: 6744 - RNA, 20 nt, Homo sapiens
  source 1..20: mol_type = unassigned RNA
tcgaagacgagagtggcatg

SEQ ID NO: 6745 - RNA, 20 nt, Homo sapiens
  source 1..20: mol_type = unassigned RNA
tgccactctcgtcttcgatg

SEQ ID NO: 6746 - RNA, 20 nt, Homo sapiens
  source 1..20: mol_type = unassigned RNA
ctccacatcgaagacgagag

SEQ ID NO: 6747 - RNA, 20 nt, Homo sapiens
  source 1..20: mol_type = unassigned RNA
cgatgtggagcttctaaaac

SEQ ID NO: 6748 - RNA, 20 nt, Homo sapiens
  source 1..20: mol_type = unassigned RNA
gcttctaaaactggaatgac

SEQ ID NO: 6749 - RNA, 20 nt, Homo sapiens
  source 1..20: mol_type = unassigned RNA
taaaactggaatgacaggaa

SEQ ID NO: 6750 - RNA, 25 nt, Homo sapiens
  source 1..25: mol_type = unassigned RNA
gtgatgaggctgtgtgcttctgagc

SEQ ID NO: 6751 - RNA, 25 nt, Homo sapiens
  source 1..25: mol_type = unassigned RNA
tgatgaggctgtgtgcttctgagct

SEQ ID NO: 6752 - RNA, 25 nt, Homo sapiens
  source 1..25: mol_type = unassigned RNA
gtgtgcttctgagctgggcatccga

SEQ ID NO: 6753 - RNA, 25 nt, Homo sapiens
  source 1..25: mol_type = unassigned RNA
tgagctgggcatccgaaggcatcct

SEQ ID NO: 6754 - RNA, 25 nt, Homo sapiens
  source 1..25: mol_type = unassigned RNA
gagctgggcatccgaaggcatcctt

SEQ ID NO: 6755 - RNA, 25 nt, Homo sapiens
  source 1..25: mol_type = unassigned RNA
agctgggcatccgaaggcatccttg

SEQ ID NO: 6756 - RNA, 25 nt, Homo sapiens
  source 1..25: mol_type = unassigned RNA
tccgaaggcatccttggggaagctg

SEQ ID NO: 6757 - RNA, 25 nt, Homo sapiens
  source 1..25: mol_type = unassigned RNA
ccgaaggcatccttggggaagctga

SEQ ID NO: 6758 - RNA, 25 nt, Homo sapiens
  source 1..25: mol_type = unassigned RNA
catccttggggaagctgagggcacg

SEQ ID NO: 6759 - RNA, 25 nt, Homo sapiens
  source 1..25: mol_type = unassigned RNA
ccttggggaagctgagggcacgagg

SEQ ID NO: 6760 - RNA, 25 nt, Homo sapiens
  source 1..25: mol_type = unassigned RNA
cttggggaagctgagggcacgagga

SEQ ID NO: 6761 - RNA, 25 nt, Homo sapiens
  source 1..25: mol_type = unassigned RNA
ttggggaagctgagggcacgaggag

SEQ ID NO: 6762 - RNA, 25 nt, Homo sapiens
  source 1..25: mol_type = unassigned RNA
ggcacgaggaggggctgccagactc

SEQ ID NO: 6763 - RNA, 25 nt, Homo sapiens
  source 1..25: mol_type = unassigned RNA
gcacgaggaggggctgccagactcc

SEQ ID NO: 6764 - RNA, 25 nt, Homo sapiens
  source 1..25: mol_type = unassigned RNA
ctgccagactccgggagctgctgcc

SEQ ID NO: 6765 - RNA, 25 nt, Homo sapiens
  source 1..25: mol_type = unassigned RNA
cagactccgggagctgctgcctggc

SEQ ID NO: 6766 - RNA, 25 nt, Homo sapiens
  source 1..25: mol_type = unassigned RNA
agactccgggagctgctgcctggct

SEQ ID NO: 6767 - RNA, 25 nt, Homo sapiens
  source 1..25: mol_type = unassigned RNA
tgggattcctacacaatgcgttgcc

SEQ ID NO: 6768 - RNA, 25 nt, Homo sapiens
  source 1..25: mol_type = unassigned RNA
tgcgttgcctggctccacgccctgc

SEQ ID NO: 6769 - RNA, 25 nt, Homo sapiens
  source 1..25: mol_type = unassigned RNA
gcgttgcctggctccacgccctgct

SEQ ID NO: 6770 - RNA, 25 nt, Homo sapiens
  source 1..25: mol_type = unassigned RNA
ctgggtcctacctgtcagagcccca

SEQ ID NO: 6771 - RNA, 25 nt, Homo sapiens
  source 1..25: mol_type = unassigned RNA
tacctgtcagagccccaaggtaaaa

SEQ ID NO: 6772 - RNA, 25 nt, Homo sapiens
  source 1..25: mol_type = unassigned RNA
tgtcagagccccaaggtaaaaaggc

SEQ ID NO: 6773 - RNA, 25 nt, Homo sapiens
  source 1..25: mol_type = unassigned RNA
gtcagagccccaaggtaaaaaggcc

SEQ ID NO: 6774 - RNA, 25 nt, Homo sapiens
  source 1..25: mol_type = unassigned RNA
ggagtagtgataccagtcaccagtt

SEQ ID NO: 6775 - RNA, 25 nt, Homo sapiens
  source 1..25: mol_type = unassigned RNA
cggagtagtgataccagtcaccagt

SEQ ID NO: 6776 - RNA, 25 nt, Homo sapiens
  source 1..25: mol_type = unassigned RNA
ccctcagcttccccaaggatgcctt

SEQ ID NO: 6777 - RNA, 25 nt, Homo sapiens
  source 1..25: mol_type = unassigned RNA
cctcctcgtgccctcagcttcccca

SEQ ID NO: 6778 - RNA, 25 nt, Homo sapiens
  source 1..25: mol_type = unassigned RNA
cagccaggcagcagctcccggagtc

SEQ ID NO: 6779 - RNA, 25 nt, Homo sapiens
  source 1..25: mol_type = unassigned RNA
ggaatcccagccaggcagcagctcc

SEQ ID NO: 6780 - RNA, 25 nt, Homo sapiens
  source 1..25: mol_type = unassigned RNA
aacgcattgtgtaggaatcccagcc

SEQ ID NO: 6781 - RNA, 25 nt, Homo sapiens
  source 1..25: mol_type = unassigned RNA
cgtggagccaggcaacgcattgtgt

SEQ ID NO: 6782 - RNA, 25 nt, Homo sapiens
  source 1..25: mol_type = unassigned RNA
gtaggacccagcagggcgtggagcc

SEQ ID NO: 6783 - RNA, 25 nt, Homo sapiens
  source 1..25: mol_type = unassigned RNA
ctgacaggtaggacccagcagggcg

SEQ ID NO: 6784 - RNA, 25 nt, Homo sapiens
  source 1..25: mol_type = unassigned RNA
gggctctgacaggtaggacccagca

SEQ ID NO: 6785 - RNA, 25 nt, Homo sapiens
  source 1..25: mol_type = unassigned RNA
ggggctctgacaggtaggacccagc

SEQ ID NO: 6786 - RNA, 25 nt, Homo sapiens
  source 1..25: mol_type = unassigned RNA
tttttaccttggggctctgacaggt

SEQ ID NO: 6787 - RNA, 25 nt, Homo sapiens
  source 1..25: mol_type = unassigned RNA
ggcctttttaccttggggctctgac

SEQ ID NO: 6788 - RNA, 25 nt, Homo sapiens
  source 1..25: mol_type = unassigned RNA
ccaggcagctcacagtgtgccacca

SEQ ID NO: 6789 - RNA, 25 nt, Homo sapiens
  source 1..25: mol_type = unassigned RNA
agctcacagtgtgccaccatggagt

SEQ ID NO: 6790 - RNA, 25 nt, Homo sapiens
  source 1..25: mol_type = unassigned RNA
gctcacagtgtgccaccatggagtt

SEQ ID NO: 6791 - RNA, 25 nt, Homo sapiens
  source 1..25: mol_type = unassigned RNA
ctcacagtgtgccaccatggagttg

SEQ ID NO: 6792 - RNA, 25 nt, Homo sapiens
  source 1..25: mol_type = unassigned RNA
ccaccatggagttggggcccctaga

SEQ ID NO: 6793 - RNA, 25 nt, Homo sapiens
  source 1..25: mol_type = unassigned RNA
ccatggagttggggcccctagaagg

SEQ ID NO: 6794 - RNA, 25 nt, Homo sapiens
  source 1..25: mol_type = unassigned RNA
ttggggcccctagaaggtggctacc

SEQ ID NO: 6795 - RNA, 25 nt, Homo sapiens
  source 1..25: mol_type = unassigned RNA
tgcctctaccacttctatgaccaga

SEQ ID NO: 6796 - RNA, 25 nt, Homo sapiens
  source 1..25: mol_type = unassigned RNA
taccacttctatgaccagatggacc

SEQ ID NO: 6797 - RNA, 25 nt, Homo sapiens
  source 1..25: mol_type = unassigned RNA
acttctatgaccagatggacctggc

SEQ ID NO: 6798 - RNA, 25 nt, Homo sapiens
  source 1..25: mol_type = unassigned RNA
gagaagaagagattgagctctactc

SEQ ID NO: 6799 - RNA, 25 nt, Homo sapiens
  source 1..25: mol_type = unassigned RNA
aagaagagattgagctctactcagg

SEQ ID NO: 6800 - RNA, 25 nt, Homo sapiens
  source 1..25: mol_type = unassigned RNA
agaagagattgagctctactcaggt

SEQ ID NO: 6801 - RNA, 25 nt, Homo sapiens
  source 1..25: mol_type = unassigned RNA
ctactcaggtgggccctcctccctc

SEQ ID NO: 6802 - RNA, 25 nt, Homo sapiens
  source 1..25: mol_type = unassigned RNA
gtggcacactgtgagctgcctggga

SEQ ID NO: 6803 - RNA, 25 nt, Homo sapiens
  source 1..25: mol_type = unassigned RNA
ggtggcacactgtgagctgcctggg

SEQ ID NO: 6804 - RNA, 25 nt, Homo sapiens
  source 1..25: mol_type = unassigned RNA
catggtggcacactgtgagctgcct

SEQ ID NO: 6805 - RNA, 25 nt, Homo sapiens
  source 1..25: mol_type = unassigned RNA
ccatggtggcacactgtgagctgcc

SEQ ID NO: 6806 - RNA, 25 nt, Homo sapiens
  source 1..25: mol_type = unassigned RNA
ccttctaggggccccaactccatgg

SEQ ID NO: 6807 - RNA, 25 nt, Homo sapiens
  source 1..25: mol_type = unassigned RNA
ccaccttctaggggccccaactcca

SEQ ID NO: 6808 - RNA, 25 nt, Homo sapiens
  source 1..25: mol_type = unassigned RNA
gaagctccaggtagccaccttctag

SEQ ID NO: 6809 - RNA, 25 nt, Homo sapiens
  source 1..25: mol_type = unassigned RNA
agaagctccaggtagccaccttcta

SEQ ID NO: 6810 - RNA, 25 nt, Homo sapiens
  source 1..25: mol_type = unassigned RNA
aagaagctccaggtagccaccttct

SEQ ID NO: 6811 - RNA, 25 nt, Homo sapiens
  source 1..25: mol_type = unassigned RNA
gtcagcatcgctgttaagaagctcc

SEQ ID NO: 6812 - RNA, 25 nt, Homo sapiens
  source 1..25: mol_type = unassigned RNA
gtcatagaagtggtagaggcacagg

SEQ ID NO: 6813 - RNA, 25 nt, Homo sapiens
  source 1..25: mol_type = unassigned RNA
ggtcatagaagtggtagaggcacag

SEQ ID NO: 6814 - RNA, 25 nt, Homo sapiens
  source 1..25: mol_type = unassigned RNA
tggtcatagaagtggtagaggcaca

SEQ ID NO: 6815 - RNA, 25 nt, Homo sapiens
  source 1..25: mol_type = unassigned RNA
ctggtcatagaagtggtagaggcac

SEQ ID NO: 6816 - RNA, 25 nt, Homo sapiens
  source 1..25: mol_type = unassigned RNA
gtccatctggtcatagaagtggtag

SEQ ID NO: 6817 - RNA, 25 nt, Homo sapiens
  source 1..25: mol_type = unassigned RNA
agccaggtccatctggtcatagaag

SEQ ID NO: 6818 - RNA, 25 nt, Homo sapiens
  source 1..25: mol_type = unassigned RNA
ctcttcttctccagccaggtccatc

SEQ ID NO: 6819 - RNA, 25 nt, Homo sapiens
  source 1..25: mol_type = unassigned RNA
gagctcaatctcttcttctccagcc

SEQ ID NO: 6820 - RNA, 25 nt, Homo sapiens
  source 1..25: mol_type = unassigned RNA
caccatcaactgcgaccagttcagc

SEQ ID NO: 6821 - RNA, 25 nt, Homo sapiens
  source 1..25: mol_type = unassigned RNA
cagttcagcaggctgttgtgtgaca

SEQ ID NO: 6822 - RNA, 25 nt, Homo sapiens
  source 1..25: mol_type = unassigned RNA
tcagcaggctgttgtgtgacatgga

SEQ ID NO: 6823 - RNA, 25 nt, Homo sapiens
  source 1..25: mol_type = unassigned RNA
tgacatggaaggtgatgaagagacc

SEQ ID NO: 6824 - RNA, 25 nt, Homo sapiens
  source 1..25: mol_type = unassigned RNA
gacatggaaggtgatgaagagacca

SEQ ID NO: 6825 - RNA, 25 nt, Homo sapiens
  source 1..25: mol_type = unassigned RNA
atggaaggtgatgaagagaccaggg

SEQ ID NO: 6826 - RNA, 25 nt, Homo sapiens
  source 1..25: mol_type = unassigned RNA
agaccagggaggcttatgccaatat

SEQ ID NO: 6827 - RNA, 25 nt, Homo sapiens
  source 1..25: mol_type = unassigned RNA
agggaggcttatgccaatatcggtg

SEQ ID NO: 6828 - RNA, 25 nt, Homo sapiens
  source 1..25: mol_type = unassigned RNA
gatggtgtctgtgtcgggttctggg

SEQ ID NO: 6829 - RNA, 25 nt, Homo sapiens
  source 1..25: mol_type = unassigned RNA
gttgatggtgtctgtgtcgggttct

SEQ ID NO: 6830 - RNA, 25 nt, Homo sapiens
  source 1..25: mol_type = unassigned RNA
agttgatggtgtctgtgtcgggttc

SEQ ID NO: 6831 - RNA, 25 nt, Homo sapiens
  source 1..25: mol_type = unassigned RNA
ggtcgcagttgatggtgtctgtgtc

SEQ ID NO: 6832 - RNA, 25 nt, Homo sapiens
  source 1..25: mol_type = unassigned RNA
tggtcgcagttgatggtgtctgtgt

SEQ ID NO: 6833 - RNA, 25 nt, Homo sapiens
  source 1..25: mol_type = unassigned RNA
agcctgctgaactggtcgcagttga

SEQ ID NO: 6834 - RNA, 25 nt, Homo sapiens
  source 1..25: mol_type = unassigned RNA
catgtcacacaacagcctgctgaac

SEQ ID NO: 6835 - RNA, 25 nt, Homo sapiens
  source 1..25: mol_type = unassigned RNA
tcaccgatattggcataagcctccc

SEQ ID NO: 6836 - RNA, 25 nt, Homo sapiens
  source 1..25: mol_type = unassigned RNA
ggctcaggtgcttcctcaccgatat

SEQ ID NO: 6837 - RNA, 25 nt, Homo sapiens
  source 1..25: mol_type = unassigned RNA
cttttccttgtctgggcagcggaac

SEQ ID NO: 6838 - RNA, 25 nt, Homo sapiens
  source 1..25: mol_type = unassigned RNA
gcggaactggaccagtatgtcttcc

SEQ ID NO: 6839 - RNA, 25 nt, Homo sapiens
  source 1..25: mol_type = unassigned RNA
cagtatgtcttccaggactcccagc

SEQ ID NO: 6840 - RNA, 25 nt, Homo sapiens
  source 1..25: mol_type = unassigned RNA
tatgtcttccaggactcccagctgg

SEQ ID NO: 6841 - RNA, 25 nt, Homo sapiens
  source 1..25: mol_type = unassigned RNA
atgtcttccaggactcccagctgga

SEQ ID NO: 6842 - RNA, 25 nt, Homo sapiens
  source 1..25: mol_type = unassigned RNA
gactcccagctggagggcctgagca

SEQ ID NO: 6843 - RNA, 25 nt, Homo sapiens
  source 1..25: mol_type = unassigned RNA
agcaaggacattttcagtaagtttg

SEQ ID NO: 6844 - RNA, 25 nt, Homo sapiens
  source 1..25: mol_type = unassigned RNA
aaggacattttcagtaagtttgtgg

SEQ ID NO: 6845 - RNA, 25 nt, Homo sapiens
  source 1..25: mol_type = unassigned RNA
aggacattttcagtaagtttgtggt

SEQ ID NO: 6846 - RNA, 25 nt, Homo sapiens
  source 1..25: mol_type = unassigned RNA
acattttcagtaagtttgtggtggg

SEQ ID NO: 6847 - RNA, 25 nt, Homo sapiens
  source 1..25: mol_type = unassigned RNA
cattttcagtaagtttgtggtgggt

SEQ ID NO: 6848 - RNA, 25 nt, Homo sapiens
  source 1..25: mol_type = unassigned RNA
ctggtccagttccgctgcccagaca

SEQ ID NO: 6849 - RNA, 25 nt, Homo sapiens
  source 1..25: mol_type = unassigned RNA
cagctgggagtcctggaagacatac

SEQ ID NO: 6850 - RNA, 25 nt, Homo sapiens
  source 1..25: mol_type = unassigned RNA
gctcaggccctccagctgggagtcc

SEQ ID NO: 6851 - RNA, 25 nt, Homo sapiens
  source 1..25: mol_type = unassigned RNA
atgtccttgctcaggccctccagct

SEQ ID NO: 6852 - RNA, 25 nt, Homo sapiens
  source 1..25: mol_type = unassigned RNA
aatgtccttgctcaggccctccagc

SEQ ID NO: 6853 - RNA, 25 nt, Homo sapiens
  source 1..25: mol_type = unassigned RNA
aaacttactgaaaatgtccttgctc

SEQ ID NO: 6854 - RNA, 25 nt, Homo sapiens
  source 1..25: mol_type = unassigned RNA
tggtttttctcaaagtagagcacat

SEQ ID NO: 6855 - RNA, 25 nt, Homo sapiens
  source 1..25: mol_type = unassigned RNA
agcacataggaccagatgaagtgat

SEQ ID NO: 6856 - RNA, 25 nt, Homo sapiens
  source 1..25: mol_type = unassigned RNA
ccagatgaagtgatcggtgagagta

SEQ ID NO: 6857 - RNA, 25 nt, Homo sapiens
  source 1..25: mol_type = unassigned RNA
agagtatggagatgccagcagaagt

SEQ ID NO: 6858 - RNA, 25 nt, Homo sapiens
  source 1..25: mol_type = unassigned RNA
gagtatggagatgccagcagaagtt

SEQ ID NO: 6859 - RNA, 25 nt, Homo sapiens
  source 1..25: mol_type = unassigned RNA
ccatactctcaccgatcacttcatc

SEQ ID NO: 6860 - RNA, 25 nt, Homo sapiens
  source 1..25: mol_type = unassigned RNA
tctgacttttctgcccaacttctgc

SEQ ID NO: 6861 - RNA, 25 nt, Homo sapiens
  source 1..25: mol_type = unassigned RNA
catgttttctctgcagccttcccag

SEQ ID NO: 6862 - RNA, 25 nt, Homo sapiens
  source 1..25: mol_type = unassigned RNA
tctgcagccttcccagaggagcttc

SEQ ID NO: 6863 - RNA, 25 nt, Homo sapiens
  source 1..25: mol_type = unassigned RNA
ggagcttccggcagacctgaagcac

SEQ ID NO: 6864 - RNA, 25 nt, Homo sapiens
  source 1..25: mol_type = unassigned RNA
cggcagacctgaagcactggaagcc

SEQ ID NO: 6865 - RNA, 25 nt, Homo sapiens
  source 1..25: mol_type = unassigned RNA
ctgaagcactggaagccaggtgtgc

SEQ ID NO: 6866 - RNA, 25 nt, Homo sapiens
  source 1..25: mol_type = unassigned RNA
tgaagcactggaagccaggtgtgca

SEQ ID NO: 6867 - RNA, 25 nt, Homo sapiens
  source 1..25: mol_type = unassigned RNA
gcactggaagccaggtgtgcagggc

SEQ ID NO: 6868 - RNA, 25 nt, Homo sapiens
  source 1..25: mol_type = unassigned RNA
ctggaagccaggtgtgcagggcagg

SEQ ID NO: 6869 - RNA, 25 nt, Homo sapiens
  source 1..25: mol_type = unassigned RNA
tggaagccaggtgtgcagggcaggt

SEQ ID NO: 6870 - RNA, 25 nt, Homo sapiens
  source 1..25: mol_type = unassigned RNA
aggtctgccggaagctcctctggga

SEQ ID NO: 6871 - RNA, 25 nt, Homo sapiens
  source 1..25: mol_type = unassigned RNA
cttcaggtctgccggaagctcctct

SEQ ID NO: 6872 - RNA, 25 nt, Homo sapiens
  source 1..25: mol_type = unassigned RNA
gcttcaggtctgccggaagctcctc

SEQ ID NO: 6873 - RNA, 25 nt, Homo sapiens
  source 1..25: mol_type = unassigned RNA
ctggcttccagtgcttcaggtctgc

SEQ ID NO: 6874 - RNA, 25 nt, Homo sapiens
  source 1..25: mol_type = unassigned RNA
ctgcacacctggcttccagtgcttc

SEQ ID NO: 6875 - RNA, 25 nt, Homo sapiens
  source 1..25: mol_type = unassigned RNA
ttcctcacagctgagccccccactg

SEQ ID NO: 6876 - RNA, 25 nt, Homo sapiens
  source 1..25: mol_type = unassigned RNA
cagctgagccccccactgtggtgac

SEQ ID NO: 6877 - RNA, 25 nt, Homo sapiens
  source 1..25: mol_type = unassigned RNA
actgtggtgactggcagtctcctag

SEQ ID NO: 6878 - RNA, 25 nt, Homo sapiens
  source 1..25: mol_type = unassigned RNA
ctgtggtgactggcagtctcctagt

SEQ ID NO: 6879 - RNA, 25 nt, Homo sapiens
  source 1..25: mol_type = unassigned RNA
ctgccactgcctgcgctgttcaacc

SEQ ID NO: 6880 - RNA, 25 nt, Homo sapiens
  source 1..25: mol_type = unassigned RNA
cgctgttcaaccaggagccagcctc

SEQ ID NO: 6881 - RNA, 25 nt, Homo sapiens
  source 1..25: mol_type = unassigned RNA
gagccagcctccggccagatgcgcc

SEQ ID NO: 6882 - RNA, 25 nt, Homo sapiens
  source 1..25: mol_type = unassigned RNA
aaaccgaccagattcccagtatgtt

SEQ ID NO: 6883 - RNA, 25 nt, Homo sapiens
  source 1..25: mol_type = unassigned RNA
aaccgaccagattcccagtatgtta

SEQ ID NO: 6884 - RNA, 25 nt, Homo sapiens
  source 1..25: mol_type = unassigned RNA
accgaccagattcccagtatgttag

SEQ ID NO: 6885 - RNA, 25 nt, Homo sapiens
  source 1..25: mol_type = unassigned RNA
ccgaccagattcccagtatgttagg

SEQ ID NO: 6886 - RNA, 25 nt, Homo sapiens
  source 1..25: mol_type = unassigned RNA
cagattcccagtatgttagggggct

SEQ ID NO: 6887 - RNA, 25 nt, Homo sapiens
  source 1..25: mol_type = unassigned RNA
gtggggggctcagctgtgaggaagt

SEQ ID NO: 6888 - RNA, 25 nt, Homo sapiens
  source 1..25: mol_type = unassigned RNA
agtggggggctcagctgtgaggaag

SEQ ID NO: 6889 - RNA, 25 nt, Homo sapiens
  source 1..25: mol_type = unassigned RNA
caccacagtggggggctcagctgtg

SEQ ID NO: 6890 - RNA, 25 nt, Homo sapiens
  source 1..25: mol_type = unassigned RNA
ggagactgccagtcaccacagtggg

SEQ ID NO: 6891 - RNA, 25 nt, Homo sapiens
  source 1..25: mol_type = unassigned RNA
aggagactgccagtcaccacagtgg

SEQ ID NO: 6892 - RNA, 25 nt, Homo sapiens
  source 1..25: mol_type = unassigned RNA
taggagactgccagtcaccacagtg

SEQ ID NO: 6893 - RNA, 25 nt, Homo sapiens
  source 1..25: mol_type = unassigned RNA
ctaggagactgccagtcaccacagt

SEQ ID NO: 6894 - RNA, 25 nt, Homo sapiens
  source 1..25: mol_type = unassigned RNA
actaggagactgccagtcaccacag

SEQ ID NO: 6895 - RNA, 25 nt, Homo sapiens
  source 1..25: mol_type = unassigned RNA
ggagcagtcgctcactggtcccact

SEQ ID NO: 6896 - RNA, 25 nt, Homo sapiens
  source 1..25: mol_type = unassigned RNA
agggcagggtggagcagtcgctcac

SEQ ID NO: 6897 - RNA, 25 nt, Homo sapiens
  source 1..25: mol_type = unassigned RNA
gcaggcagtggcaggcagggcaggg

SEQ ID NO: 6898 - RNA, 25 nt, Homo sapiens
  source 1..25: mol_type = unassigned RNA
agcgcaggcagtggcaggcagggca

SEQ ID NO: 6899 - RNA, 25 nt, Homo sapiens
  source 1..25: mol_type = unassigned RNA
cagcgcaggcagtggcaggcagggc

SEQ ID NO: 6900 - RNA, 25 nt, Homo sapiens
  source 1..25: mol_type = unassigned RNA
tgaacagcgcaggcagtggcaggca

SEQ ID NO: 6901 - RNA, 25 nt, Homo sapiens
  source 1..25: mol_type = unassigned RNA
ttgaacagcgcaggcagtggcaggc

SEQ ID NO: 6902 - RNA, 25 nt, Homo sapiens
  source 1..25: mol_type = unassigned RNA
ctggttgaacagcgcaggcagtggc

SEQ ID NO: 6903 - RNA, 25 nt, Homo sapiens
  source 1..25: mol_type = unassigned RNA
gctcctggttgaacagcgcaggcag

SEQ ID NO: 6904 - RNA, 25 nt, Homo sapiens
  source 1..25: mol_type = unassigned RNA
aggctggctcctggttgaacagcgc

SEQ ID NO: 6905 - RNA, 25 nt, Homo sapiens
  source 1..25: mol_type = unassigned RNA
gcgcatctggccggaggctggctcc

SEQ ID NO: 6906 - RNA, 25 nt, Homo sapiens
  source 1..25: mol_type = unassigned RNA
tctccaggcgcatctggccggaggc

SEQ ID NO: 6907 - RNA, 25 nt, Homo sapiens
  source 1..25: mol_type = unassigned RNA
gttttctccaggcgcatctggccgg

SEQ ID NO: 6908 - RNA, 25 nt, Homo sapiens
  source 1..25: mol_type = unassigned RNA
tcggttttctccaggcgcatctggc

SEQ ID NO: 6909 - RNA, 25 nt, Homo sapiens
  source 1..25: mol_type = unassigned RNA
ctggtcggttttctccaggcgcatc

SEQ ID NO: 6910 - RNA, 25 nt, Homo sapiens
  source 1..25: mol_type = unassigned RNA
actgggaatctggtcggttttctcc

SEQ ID NO: 6911 - RNA, 25 nt, Homo sapiens
  source 1..25: mol_type = unassigned RNA
ccccctaacatactgggaatctggt

SEQ ID NO: 6912 - RNA, 25 nt, Homo sapiens
  source 1..25: mol_type = unassigned RNA
caagccccctaacatactgggaatc

SEQ ID NO: 6913 - RNA, 25 nt, Homo sapiens
  source 1..25: mol_type = unassigned RNA
tcgttgagctgcctgaatctccctg

SEQ ID NO: 6914 - RNA, 25 nt, Homo sapiens
  source 1..25: mol_type = unassigned RNA
cgttgagctgcctgaatctccctga

SEQ ID NO: 6915 - RNA, 25 nt, Homo sapiens
  source 1..25: mol_type = unassigned RNA
tccccaccatctccactctgcccca

SEQ ID NO: 6916 - RNA, 25 nt, Homo sapiens
  source 1..25: mol_type = unassigned RNA
ccccaccatctccactctgccccat

SEQ ID NO: 6917 - RNA, 25 nt, Homo sapiens
  source 1..25: mol_type = unassigned RNA
catctccactctgccccatgggctc

SEQ ID NO: 6918 - RNA, 25 nt, Homo sapiens
  source 1..25: mol_type = unassigned RNA
ccccatgggctctggcaaatctctg

SEQ ID NO: 6919 - RNA, 25 nt, Homo sapiens
  source 1..25: mol_type = unassigned RNA
atgggctctggcaaatctctgaggc

SEQ ID NO: 6920 - RNA, 25 nt, Homo sapiens
  source 1..25: mol_type = unassigned RNA
tctggcaaatctctgaggctggaac

SEQ ID NO: 6921 - RNA, 25 nt, Homo sapiens
  source 1..25: mol_type = unassigned RNA
ctggcaaatctctgaggctggaaca

SEQ ID NO: 6922 - RNA, 25 nt, Homo sapiens
  source 1..25: mol_type = unassigned RNA
tggcaaatctctgaggctggaacag

SEQ ID NO: 6923 - RNA, 25 nt, Homo sapiens
  source 1..25: mol_type = unassigned RNA
gggtctccagtatattcatctacca

SEQ ID NO: 6924 - RNA, 25 nt, Homo sapiens
  source 1..25: mol_type = unassigned RNA
gtatattcatctaccatggtgagtg

SEQ ID NO: 6925 - RNA, 25 nt, Homo sapiens
  source 1..25: mol_type = unassigned RNA
tatattcatctaccatggtgagtgc

SEQ ID NO: 6926 - RNA, 25 nt, Homo sapiens
  source 1..25: mol_type = unassigned RNA
atattcatctaccatggtgagtgcg

SEQ ID NO: 6927 - RNA, 25 nt, Homo sapiens
  source 1..25: mol_type = unassigned RNA
catctaccatggtgagtgcggggcc

SEQ ID NO: 6928 - RNA, 25 nt, Homo sapiens
  source 1..25: mol_type = unassigned RNA
tggagaaaggcactgcaagagacaa

SEQ ID NO: 6929 - RNA, 25 nt, Homo sapiens
  source 1..25: mol_type = unassigned RNA
ggcagctcaacgaggaactggagaa

SEQ ID NO: 6930 - RNA, 25 nt, Homo sapiens
  source 1..25: mol_type = unassigned RNA
agattcaggcagctcaacgaggaac

SEQ ID NO: 6931 - RNA, 25 nt, Homo sapiens
  source 1..25: mol_type = unassigned RNA
tcagggagattcaggcagctcaacg

SEQ ID NO: 6932 - RNA, 25 nt, Homo sapiens
  source 1..25: mol_type = unassigned RNA
ctggatgggtccctcagggagattc

SEQ ID NO: 6933 - RNA, 25 nt, Homo sapiens
  source 1..25: mol_type = unassigned RNA
ggggacaaactggatgggtccctca

SEQ ID NO: 6934 - RNA, 25 nt, Homo sapiens
  source 1..25: mol_type = unassigned RNA
tggggacaaactggatgggtccctc

SEQ ID NO: 6935 - RNA, 25 nt, Homo sapiens
  source 1..25: mol_type = unassigned RNA
tggagatggtggggacaaactggat

SEQ ID NO: 6936 - RNA, 25 nt, Homo sapiens
  source 1..25: mol_type = unassigned RNA
gtggagatggtggggacaaactgga

SEQ ID NO: 6937 - RNA, 25 nt, Homo sapiens
  source 1..25: mol_type = unassigned RNA
cagagtggagatggtggggacaaac

SEQ ID NO: 6938 - RNA, 25 nt, Homo sapiens
  source 1..25: mol_type = unassigned RNA
cccatggggcagagtggagatggtg

SEQ ID NO: 6939 - RNA, 25 nt, Homo sapiens
  source 1..25: mol_type = unassigned RNA
gcccatggggcagagtggagatggt

SEQ ID NO: 6940 - RNA, 25 nt, Homo sapiens
  source 1..25: mol_type = unassigned RNA
agcccatggggcagagtggagatgg

SEQ ID NO: 6941 - RNA, 25 nt, Homo sapiens
  source 1..25: mol_type = unassigned RNA
cagagcccatggggcagagtggaga

SEQ ID NO: 6942 - RNA, 25 nt, Homo sapiens
  source 1..25: mol_type = unassigned RNA
atttgccagagcccatggggcagag

SEQ ID NO: 6943 - RNA, 25 nt, Homo sapiens
  source 1..25: mol_type = unassigned RNA
cctcagagatttgccagagcccatg

SEQ ID NO: 6944 - RNA, 25 nt, Homo sapiens
  source 1..25: mol_type = unassigned RNA
gcctcagagatttgccagagcccat

SEQ ID NO: 6945 - RNA, 25 nt, Homo sapiens
  source 1..25: mol_type = unassigned RNA
agcctcagagatttgccagagccca

SEQ ID NO: 6946 - RNA, 25 nt, Homo sapiens
  source 1..25: mol_type = unassigned RNA
cactcaccatggtagatgaatatac

SEQ ID NO: 6947 - RNA, 25 nt, Homo sapiens
  source 1..25: mol_type = unassigned RNA
acccccaatgtaggtgaggtgcccc

SEQ ID NO: 6948 - RNA, 25 nt, Homo sapiens
  source 1..25: mol_type = unassigned RNA
aggccagccaagtaccccctcccag

SEQ ID NO: 6949 - RNA, 25 nt, Homo sapiens
  source 1..25: mol_type = unassigned RNA
cccctcccagtggattcactgtcca

SEQ ID NO: 6950 - RNA, 25 nt, Homo sapiens
  source 1..25: mol_type = unassigned RNA
ccacggcctcccaacatctccagac

SEQ ID NO: 6951 - RNA, 25 nt, Homo sapiens
  source 1..25: mol_type = unassigned RNA
gcctcccaacatctccagaccggcc

SEQ ID NO: 6952 - RNA, 25 nt, Homo sapiens
  source 1..25: mol_type = unassigned RNA
ccctgacctcccgagcaaacatgac

SEQ ID NO: 6953 - RNA, 25 nt, Homo sapiens
  source 1..25: mol_type = unassigned RNA
acctcccgagcaaacatgacaggta

SEQ ID NO: 6954 - RNA, 25 nt, Homo sapiens
  source 1..25: mol_type = unassigned RNA
gcaaacatgacaggtaaggaccctt

SEQ ID NO: 6955 - RNA, 25 nt, Homo sapiens
  source 1..25: mol_type = unassigned RNA
caaacatgacaggtaaggaccctta

SEQ ID NO: 6956 - RNA, 25 nt, Homo sapiens
  source 1..25: mol_type = unassigned RNA
tggggcacctcacctacattggggg

SEQ ID NO: 6957 - RNA, 25 nt, Homo sapiens
  source 1..25: mol_type = unassigned RNA
gcctggggcacctcacctacattgg

SEQ ID NO: 6958 - RNA, 25 nt, Homo sapiens
  source 1..25: mol_type = unassigned RNA
ggcctggggcacctcacctacattg

SEQ ID NO: 6959 - RNA, 25 nt, Homo sapiens
  source 1..25: mol_type = unassigned RNA
tggcctggggcacctcacctacatt

SEQ ID NO: 6960 - RNA, 25 nt, Homo sapiens
  source 1..25: mol_type = unassigned RNA
ctggcctggggcacctcacctacat

SEQ ID NO: 6961 - RNA, 25 nt, Homo sapiens
  source 1..25: mol_type = unassigned RNA
tgggagggggtacttggctggcctg

SEQ ID NO: 6962 - RNA, 25 nt, Homo sapiens
  source 1..25: mol_type = unassigned RNA
ctgggagggggtacttggctggcct

SEQ ID NO: 6963 - RNA, 25 nt, Homo sapiens
  source 1..25: mol_type = unassigned RNA
actgggagggggtacttggctggcc

SEQ ID NO: 6964 - RNA, 25 nt, Homo sapiens
  source 1..25: mol_type = unassigned RNA
aatccactgggagggggtacttggc

SEQ ID NO: 6965 - RNA, 25 nt, Homo sapiens
  source 1..25: mol_type = unassigned RNA
agtgaatccactgggagggggtact

SEQ ID NO: 6966 - RNA, 25 nt, Homo sapiens
  source 1..25: mol_type = unassigned RNA
cgtggacagtgaatccactgggagg

SEQ ID NO: 6967 - RNA, 25 nt, Homo sapiens
  source 1..25: mol_type = unassigned RNA
ccgtggacagtgaatccactgggag

SEQ ID NO: 6968 - RNA, 25 nt, Homo sapiens
  source 1..25: mol_type = unassigned RNA
gccgtggacagtgaatccactggga

SEQ ID NO: 6969 - RNA, 25 nt, Homo sapiens
  source 1..25: mol_type = unassigned RNA
ggccgtggacagtgaatccactggg

SEQ ID NO: 6970 - RNA, 25 nt, Homo sapiens
  source 1..25: mol_type = unassigned RNA
ggaggccgtggacagtgaatccact

SEQ ID NO: 6971 - RNA, 25 nt, Homo sapiens
  source 1..25: mol_type = unassigned RNA
gggaggccgtggacagtgaatccac

SEQ ID NO: 6972 - RNA, 25 nt, Homo sapiens
  source 1..25: mol_type = unassigned RNA
ccggtctggagatgttgggaggccg

SEQ ID NO: 6973 - RNA, 25 nt, Homo sapiens
  source 1..25: mol_type = unassigned RNA
gcctggccggtctggagatgttggg

SEQ ID NO: 6974 - RNA, 25 nt, Homo sapiens
  source 1..25: mol_type = unassigned RNA
ggagcctggccggtctggagatgtt

SEQ ID NO: 6975 - RNA, 25 nt, Homo sapiens
  source 1..25: mol_type = unassigned RNA
tggagcctggccggtctggagatgt

SEQ ID NO: 6976 - RNA, 25 nt, Homo sapiens
  source 1..25: mol_type = unassigned RNA
aggggctggtggagcctggccggtc

SEQ ID NO: 6977 - RNA, 25 nt, Homo sapiens
  source 1..25: mol_type = unassigned RNA
agcgaaggggctggtggagcctggc

SEQ ID NO: 6978 - RNA, 25 nt, Homo sapiens
  source 1..25: mol_type = unassigned RNA
atggagcgaaggggctggtggagcc

SEQ ID NO: 6979 - RNA, 25 nt, Homo sapiens
  source 1..25: mol_type = unassigned RNA
ctggctgatggagcgaaggggctgg

SEQ ID NO: 6980 - RNA, 25 nt, Homo sapiens
  source 1..25: mol_type = unassigned RNA
agtctggctgatggagcgaaggggc

SEQ ID NO: 6981 - RNA, 25 nt, Homo sapiens
  source 1..25: mol_type = unassigned RNA
gtccagtctggctgatggagcgaag

SEQ ID NO: 6982 - RNA, 25 nt, Homo sapiens
  source 1..25: mol_type = unassigned RNA
cgtccagtctggctgatggagcgaa

SEQ ID NO: 6983 - RNA, 25 nt, Homo sapiens
  source 1..25: mol_type = unassigned RNA
ccgtccagtctggctgatggagcga

SEQ ID NO: 6984 - RNA, 25 nt, Homo sapiens
  source 1..25: mol_type = unassigned RNA
cgtacgacccgtccagtctggctga

SEQ ID NO: 6985 - RNA, 25 nt, Homo sapiens
  source 1..25: mol_type = unassigned RNA
ccaagtccgtacgacccgtccagtc

SEQ ID NO: 6986 - RNA, 25 nt, Homo sapiens
  source 1..25: mol_type = unassigned RNA
gggtccttacctgtcatgtttgctc

SEQ ID NO: 6987 - RNA, 25 nt, Homo sapiens
  source 1..25: mol_type = unassigned RNA
agggtccttacctgtcatgtttgct

SEQ ID NO: 6988 - RNA, 25 nt, Homo sapiens
  source 1..25: mol_type = unassigned RNA
cacaagacgtcccccacccaatgcc

SEQ ID NO: 6989 - RNA, 25 nt, Homo sapiens
  source 1..25: mol_type = unassigned RNA
cgtcccccacccaatgcccggcagc

SEQ ID NO: 6990 - RNA, 25 nt, Homo sapiens
  source 1..25: mol_type = unassigned RNA
cccacccaatgcccggcagctggag

SEQ ID NO: 6991 - RNA, 25 nt, Homo sapiens
  source 1..25: mol_type = unassigned RNA
agaggtctccaacaagcttccaaaa

SEQ ID NO: 6992 - RNA, 25 nt, Homo sapiens
  source 1..25: mol_type = unassigned RNA
tctccaacaagcttccaaaatggcc

SEQ ID NO: 6993 - RNA, 25 nt, Homo sapiens
  source 1..25: mol_type = unassigned RNA
ttccaaaatggcctggtgagtgatg

SEQ ID NO: 6994 - RNA, 25 nt, Homo sapiens
  source 1..25: mol_type = unassigned RNA
tccaaaatggcctggtgagtgatgc

SEQ ID NO: 6995 - RNA, 25 nt, Homo sapiens
  source 1..25: mol_type = unassigned RNA
tcttgtgctctggagatggagaagc

SEQ ID NO: 6996 - RNA, 25 nt, Homo sapiens
  source 1..25: mol_type = unassigned RNA
tgggggacgtcttgtgctctggaga

SEQ ID NO: 6997 - RNA, 25 nt, Homo sapiens
  source 1..25: mol_type = unassigned RNA
attgggtgggggacgtcttgtgctc

SEQ ID NO: 6998 - RNA, 25 nt, Homo sapiens
  source 1..25: mol_type = unassigned RNA
tctccagctgccgggcattgggtgg

SEQ ID NO: 6999 - RNA, 25 nt, Homo sapiens
  source 1..25: mol_type = unassigned RNA
ctctccagctgccgggcattgggtg

SEQ ID NO: 7000 - RNA, 25 nt, Homo sapiens
  source 1..25: mol_type = unassigned RNA
cctctccagctgccgggcattgggt

SEQ ID NO: 7001 - RNA, 25 nt, Homo sapiens
  source 1..25: mol_type = unassigned RNA
acctctccagctgccgggcattggg

SEQ ID NO: 7002 - RNA, 25 nt, Homo sapiens
  source 1..25: mol_type = unassigned RNA
gagacctctccagctgccgggcatt

SEQ ID NO: 7003 - RNA, 25 nt, Homo sapiens
  source 1..25: mol_type = unassigned RNA
ggagacctctccagctgccgggcat

SEQ ID NO: 7004 - RNA, 25 nt, Homo sapiens
  source 1..25: mol_type = unassigned RNA
cttgttggagacctctccagctgcc

SEQ ID NO: 7005 - RNA, 25 nt, Homo sapiens
  source 1..25: mol_type = unassigned RNA
gcttgttggagacctctccagctgc

SEQ ID NO: 7006 - RNA, 25 nt, Homo sapiens
  source 1..25: mol_type = unassigned RNA
tcaccaggccattttggaagcttgt

SEQ ID NO: 7007 - RNA, 25 nt, Homo sapiens
  source 1..25: mol_type = unassigned RNA
tcccgcatcactcaccaggccattt

SEQ ID NO: 7008 - RNA, 25 nt, Homo sapiens
  source 1..25: mol_type = unassigned RNA
acgcccctggcctttgcagagccgg

SEQ ID NO: 7009 - RNA, 25 nt, Homo sapiens
  source 1..25: mol_type = unassigned RNA
gtggagcagttctaccgctcactgc

SEQ ID NO: 7010 - RNA, 25 nt, Homo sapiens
  source 1..25: mol_type = unassigned RNA
tctaccgctcactgcaggacacgta

SEQ ID NO: 7011 - RNA, 25 nt, Homo sapiens
  source 1..25: mol_type = unassigned RNA
aggacacgtatggtgccgagcccgc

SEQ ID NO: 7012 - RNA, 25 nt, Homo sapiens
  source 1..25: mol_type = unassigned RNA
acgtatggtgccgagcccgcaggcc

SEQ ID NO: 7013 - RNA, 25 nt, Homo sapiens
  source 1..25: mol_type = unassigned RNA
atggtgccgagcccgcaggcccgga

SEQ ID NO: 7014 - RNA, 25 nt, Homo sapiens
  source 1..25: mol_type = unassigned RNA
agcctggagcgggaactggccaccc

SEQ ID NO: 7015 - RNA, 25 nt, Homo sapiens
  source 1..25: mol_type = unassigned RNA
ggagcgggaactggccaccccggac

SEQ ID NO: 7016 - RNA, 25 nt, Homo sapiens
  source 1..25: mol_type = unassigned RNA
gagcgggaactggccaccccggact

SEQ ID NO: 7017 - RNA, 25 nt, Homo sapiens
  source 1..25: mol_type = unassigned RNA
actggccaccccggactgggcagaa

SEQ ID NO: 7018 - RNA, 25 nt, Homo sapiens
  source 1..25: mol_type = unassigned RNA
accccggactgggcagaacggcagc

SEQ ID NO: 7019 - RNA, 25 nt, Homo sapiens
  source 1..25: mol_type = unassigned RNA
actgggcagaacggcagctggccca

SEQ ID NO: 7020 - RNA, 25 nt, Homo sapiens
  source 1..25: mol_type = unassigned RNA
gggcagaacggcagctggcccaagg

SEQ ID NO: 7021 - RNA, 25 nt, Homo sapiens
  source 1..25: mol_type = unassigned RNA
gaacggcagctggcccaaggaggcc

SEQ ID NO: 7022 - RNA, 25 nt, Homo sapiens
  source 1..25: mol_type = unassigned RNA
cagctggcccaaggaggcctggctg

SEQ ID NO: 7023 - RNA, 25 nt, Homo sapiens
  source 1..25: mol_type = unassigned RNA
caaggaggcctggctgaggtgctgt

SEQ ID NO: 7024 - RNA, 25 nt, Homo sapiens
  source 1..25: mol_type = unassigned RNA
ctggctgaggtgctgttggctgcca

SEQ ID NO: 7025 - RNA, 25 nt, Homo sapiens
  source 1..25: mol_type = unassigned RNA
ggtgctgttggctgccaaggagcac

SEQ ID NO: 7026 - RNA, 25 nt, Homo sapiens
  source 1..25: mol_type = unassigned RNA
gctgttggctgccaaggagcaccgg

SEQ ID NO: 7027 - RNA, 25 nt, Homo sapiens
  source 1..25: mol_type = unassigned RNA
cgtgagacacgagtgattgctgtgc

SEQ ID NO: 7028 - RNA, 25 nt, Homo sapiens
  source 1..25: mol_type = unassigned RNA
gtgagacacgagtgattgctgtgct

SEQ ID NO: 7029 - RNA, 25 nt, Homo sapiens
  source 1..25: mol_type = unassigned RNA
gagtgattgctgtgctgggcaaagc

SEQ ID NO: 7030 - RNA, 25 nt, Homo sapiens
  source 1..25: mol_type = unassigned RNA
attgctgtgctgggcaaagctggtc

SEQ ID NO: 7031 - RNA, 25 nt, Homo sapiens
  source 1..25: mol_type = unassigned RNA
ttgctgtgctgggcaaagctggtca

SEQ ID NO: 7032 - RNA, 25 nt, Homo sapiens
  source 1..25: mol_type = unassigned RNA
caaagctggtcagggcaagagctat

SEQ ID NO: 7033 - RNA, 25 nt, Homo sapiens
  source 1..25: mol_type = unassigned RNA
aaagctggtcagggcaagagctatt

SEQ ID NO: 7034 - RNA, 25 nt, Homo sapiens
  source 1..25: mol_type = unassigned RNA
ctggtcagggcaagagctattgggc

SEQ ID NO: 7035 - RNA, 25 nt, Homo sapiens
  source 1..25: mol_type = unassigned RNA
tggtcagggcaagagctattgggct

SEQ ID NO: 7036 - RNA, 25 nt, Homo sapiens
  source 1..25: mol_type = unassigned RNA
ggtcagggcaagagctattgggctg

SEQ ID NO: 7037 - RNA, 25 nt, Homo sapiens
  source 1..25: mol_type = unassigned RNA
gagctattgggctggggcagtgagc

SEQ ID NO: 7038 - RNA, 25 nt, Homo sapiens
  source 1..25: mol_type = unassigned RNA
agctattgggctggggcagtgagcc

SEQ ID NO: 7039 - RNA, 25 nt, Homo sapiens
  source 1..25: mol_type = unassigned RNA
ttgggctggggcagtgagccgggcc

SEQ ID NO: 7040 - RNA, 25 nt, Homo sapiens
  source 1..25: mol_type = unassigned RNA
tgggctggggcagtgagccgggcct

SEQ ID NO: 7041 - RNA, 25 nt, Homo sapiens
  source 1..25: mol_type = unassigned RNA
gggcagtgagccgggcctgggcttg

SEQ ID NO: 7042 - RNA, 25 nt, Homo sapiens
  source 1..25: mol_type = unassigned RNA
agtgagccgggcctgggcttgtggc

SEQ ID NO: 7043 - RNA, 25 nt, Homo sapiens
  source 1..25: mol_type = unassigned RNA
gtcccctgccattgcttgaaccgtc

SEQ ID NO: 7044 - RNA, 25 nt, Homo sapiens
  source 1..25: mol_type = unassigned RNA
tcccctgccattgcttgaaccgtcc

SEQ ID NO: 7045 - RNA, 25 nt, Homo sapiens
  source 1..25: mol_type = unassigned RNA
cccctgccattgcttgaaccgtccg

SEQ ID NO: 7046 - RNA, 25 nt, Homo sapiens
  source 1..25: mol_type = unassigned RNA
ccctgccattgcttgaaccgtccgg

SEQ ID NO: 7047 - RNA, 25 nt, Homo sapiens
  source 1..25: mol_type = unassigned RNA
gcttgaaccgtccgggggatgccta

SEQ ID NO: 7048 - RNA, 25 nt, Homo sapiens
  source 1..25: mol_type = unassigned RNA
cgtccgggggatgcctatggcctgc

SEQ ID NO: 7049 - RNA, 25 nt, Homo sapiens
  source 1..25: mol_type = unassigned RNA
ggcctgcaggatctgctcttctccc

SEQ ID NO: 7050 - RNA, 25 nt, Homo sapiens
  source 1..25: mol_type = unassigned RNA
gcctgcaggatctgctcttctccct

SEQ ID NO: 7051 - RNA, 25 nt, Homo sapiens
  source 1..25: mol_type = unassigned RNA
ttctccctgggcccacagccactcg

SEQ ID NO: 7052 - RNA, 25 nt, Homo sapiens
  source 1..25: mol_type = unassigned RNA
tccctgggcccacagccactcgtgg

SEQ ID NO: 7053 - RNA, 25 nt, Homo sapiens
  source 1..25: mol_type = unassigned RNA
ccacagccactcgtggcggccgatg

SEQ ID NO: 7054 - RNA, 25 nt, Homo sapiens
  source 1..25: mol_type = unassigned RNA
ctgaccgcgttctgctcatcctaga

SEQ ID NO: 7055 - RNA, 25 nt, Homo sapiens
  source 1..25: mol_type = unassigned RNA
gttctgctcatcctagacggcttcg

SEQ ID NO: 7056 - RNA, 25 nt, Homo sapiens
  source 1..25: mol_type = unassigned RNA
ctcatcctagacggcttcgaggagc

SEQ ID NO: 7057 - RNA, 25 nt, Homo sapiens
  source 1..25: mol_type = unassigned RNA
gcttcgaggagctggaagcgcaaga

SEQ ID NO: 7058 - RNA, 25 nt, Homo sapiens
  source 1..25: mol_type = unassigned RNA
aagatggcttcctgcacagcacgtg

SEQ ID NO: 7059 - RNA, 25 nt, Homo sapiens
  source 1..25: mol_type = unassigned RNA
ggcttcctgcacagcacgtgcggac

SEQ ID NO: 7060 - RNA, 25 nt, Homo sapiens
  source 1..25: mol_type = unassigned RNA
ctgcacagcacgtgcggaccggcac

SEQ ID NO: 7061 - RNA, 25 nt, Homo sapiens
  source 1..25: mol_type = unassigned RNA
cacagcacgtgcggaccggcaccgg

SEQ ID NO: 7062 - RNA, 25 nt, Homo sapiens
  source 1..25: mol_type = unassigned RNA
ggcaccggcggagccctgctccctc

SEQ ID NO: 7063 - RNA, 25 nt, Homo sapiens
  source 1..25: mol_type = unassigned RNA
gcaccggcggagccctgctccctcc

SEQ ID NO: 7064 - RNA, 25 nt, Homo sapiens
  source 1..25: mol_type = unassigned RNA
caccggcggagccctgctccctccg

SEQ ID NO: 7065 - RNA, 25 nt, Homo sapiens
  source 1..25: mol_type = unassigned RNA
accggcggagccctgctccctccgg

SEQ ID NO: 7066 - RNA, 25 nt, Homo sapiens
  source 1..25: mol_type = unassigned RNA
gagccctgctccctccgggggctgc

SEQ ID NO: 7067 - RNA, 25 nt, Homo sapiens
  source 1..25: mol_type = unassigned RNA
cctgctccctccgggggctgctggc

SEQ ID NO: 7068 - RNA, 25 nt, Homo sapiens
  source 1..25: mol_type = unassigned RNA
gccttttccagaagaagctgctccg

SEQ ID NO: 7069 - RNA, 25 nt, Homo sapiens
  source 1..25: mol_type = unassigned RNA
aggttgcaccctcctcctcacagcc

SEQ ID NO: 7070 - RNA, 25 nt, Homo sapiens
  source 1..25: mol_type = unassigned RNA
caccctcctcctcacagcccggccc

SEQ ID NO: 7071 - RNA, 25 nt, Homo sapiens
  source 1..25: mol_type = unassigned RNA
accctcctcctcacagcccggcccc

SEQ ID NO: 7072 - RNA, 25 nt, Homo sapiens
  source 1..25: mol_type = unassigned RNA
ccctcctcctcacagcccggccccg

SEQ ID NO: 7073 - RNA, 25 nt, Homo sapiens
  source 1..25: mol_type = unassigned RNA
ctcacagcccggccccggggccgcc

SEQ ID NO: 7074 - RNA, 25 nt, Homo sapiens
  source 1..25: mol_type = unassigned RNA
ggccgcctggtccagagcctgagca

SEQ ID NO: 7075 - RNA, 25 nt, Homo sapiens
  source 1..25: mol_type = unassigned RNA
aggccgacgccctatttgagctgtc

SEQ ID NO: 7076 - RNA, 25 nt, Homo sapiens
  source 1..25: mol_type = unassigned RNA
ctatttgagctgtccggcttctcca

SEQ ID NO: 7077 - RNA, 25 nt, Homo sapiens
  source 1..25: mol_type = unassigned RNA
gagctgtccggcttctccatggagc

SEQ ID NO: 7078 - RNA, 25 nt, Homo sapiens
  source 1..25: mol_type = unassigned RNA
tccggcttctccatggagcaggccc

SEQ ID NO: 7079 - RNA, 25 nt, Homo sapiens
  source 1..25: mol_type = unassigned RNA
acgtgatgcgctactttgagagctc

SEQ ID NO: 7080 - RNA, 25 nt, Homo sapiens
  source 1..25: mol_type = unassigned RNA
cgtgatgcgctactttgagagctca

SEQ ID NO: 7081 - RNA, 25 nt, Homo sapiens
  source 1..25: mol_type = unassigned RNA
ccaagacagagccctgacgctcctc

SEQ ID NO: 7082 - RNA, 25 nt, Homo sapiens
  source 1..25: mol_type = unassigned RNA
caagacagagccctgacgctcctcc

SEQ ID NO: 7083 - RNA, 25 nt, Homo sapiens
  source 1..25: mol_type = unassigned RNA
cagagccctgacgctcctccgggac

SEQ ID NO: 7084 - RNA, 25 nt, Homo sapiens
  source 1..25: mol_type = unassigned RNA
tcacagccacagccctactttgtgc

SEQ ID NO: 7085 - RNA, 25 nt, Homo sapiens
  source 1..25: mol_type = unassigned RNA
cacagccacagccctactttgtgcc

SEQ ID NO: 7086 - RNA, 25 nt, Homo sapiens
  source 1..25: mol_type = unassigned RNA
tgccgggcagtgtgccagctctcag

SEQ ID NO: 7087 - RNA, 25 nt, Homo sapiens
  source 1..25: mol_type = unassigned RNA
gtgtgccagctctcagaggccctgc

SEQ ID NO: 7088 - RNA, 25 nt, Homo sapiens
  source 1..25: mol_type = unassigned RNA
agctctcagaggccctgctggagct

SEQ ID NO: 7089 - RNA, 25 nt, Homo sapiens
  source 1..25: mol_type = unassigned RNA
gctctcagaggccctgctggagctt

SEQ ID NO: 7090 - RNA, 25 nt, Homo sapiens
  source 1..25: mol_type = unassigned RNA
ctctcagaggccctgctggagcttg

SEQ ID NO: 7091 - RNA, 25 nt, Homo sapiens
  source 1..25: mol_type = unassigned RNA
tcagaggccctgctggagcttgggg

SEQ ID NO: 7092 - RNA, 25 nt, Homo sapiens
  source 1..25: mol_type = unassigned RNA
gacgccaagctgccctccacgctca

SEQ ID NO: 7093 - RNA, 25 nt, Homo sapiens
  source 1..25: mol_type = unassigned RNA
acgccaagctgccctccacgctcac

SEQ ID NO: 7094 - RNA, 25 nt, Homo sapiens
  source 1..25: mol_type = unassigned RNA
cctccacgctcacgggactctatgt

SEQ ID NO: 7095 - RNA, 25 nt, Homo sapiens
  source 1..25: mol_type = unassigned RNA
ctcacgggactctatgtcggcctgc

SEQ ID NO: 7096 - RNA, 25 nt, Homo sapiens
  source 1..25: mol_type = unassigned RNA
tcacgggactctatgtcggcctgct

SEQ ID NO: 7097 - RNA, 25 nt, Homo sapiens
  source 1..25: mol_type = unassigned RNA
gccgtgcagccctcgacagcccccc

SEQ ID NO: 7098 - RNA, 25 nt, Homo sapiens
  source 1..25: mol_type = unassigned RNA
ccgtgcagccctcgacagccccccc

SEQ ID NO: 7099 - RNA, 25 nt, Homo sapiens
  source 1..25: mol_type = unassigned RNA
cgtgcagccctcgacagcccccccg

SEQ ID NO: 7100 - RNA, 25 nt, Homo sapiens
  source 1..25: mol_type = unassigned RNA
gccctcgacagcccccccggggccc

SEQ ID NO: 7101 - RNA, 25 nt, Homo sapiens
  source 1..25: mol_type = unassigned RNA
agcccccccggggccctggcagagc

SEQ ID NO: 7102 - RNA, 25 nt, Homo sapiens
  source 1..25: mol_type = unassigned RNA
ggggccctggcagagctggccaagc

SEQ ID NO: 7103 - RNA, 25 nt, Homo sapiens
  source 1..25: mol_type = unassigned RNA
cctggcagagctggccaagctggcc

SEQ ID NO: 7104 - RNA, 25 nt, Homo sapiens
  source 1..25: mol_type = unassigned RNA
ctggcagagctggccaagctggcct

SEQ ID NO: 7105 - RNA, 25 nt, Homo sapiens
  source 1..25: mol_type = unassigned RNA
gagctggccaagctggcctgggagc

SEQ ID NO: 7106 - RNA, 25 nt, Homo sapiens
  source 1..25: mol_type = unassigned RNA
agctggccaagctggcctgggagct

SEQ ID NO: 7107 - RNA, 25 nt, Homo sapiens
  source 1..25: mol_type = unassigned RNA
ggccgcagacatcaaagtaccctac

SEQ ID NO: 7108 - RNA, 25 nt, Homo sapiens
  source 1..25: mol_type = unassigned RNA
cgcagacatcaaagtaccctacagg

SEQ ID NO: 7109 - RNA, 25 nt, Homo sapiens
  source 1..25: mol_type = unassigned RNA
ggaccagttcccatccgcagacgtg

SEQ ID NO: 7110 - RNA, 25 nt, Homo sapiens
  source 1..25: mol_type = unassigned RNA
gttcccatccgcagacgtgaggacc

SEQ ID NO: 7111 - RNA, 25 nt, Homo sapiens
  source 1..25: mol_type = unassigned RNA
ttcccatccgcagacgtgaggacct

SEQ ID NO: 7112 - RNA, 25 nt, Homo sapiens
  source 1..25: mol_type = unassigned RNA
tccgcagacgtgaggacctgggcga

SEQ ID NO: 7113 - RNA, 25 nt, Homo sapiens
  source 1..25: mol_type = unassigned RNA
acgtgaggacctgggcgatggccaa

SEQ ID NO: 7114 - RNA, 25 nt, Homo sapiens
  source 1..25: mol_type = unassigned RNA
caaaggcttagtccaacacccaccg

SEQ ID NO: 7115 - RNA, 25 nt, Homo sapiens
  source 1..25: mol_type = unassigned RNA
aaaggcttagtccaacacccaccgc

SEQ ID NO: 7116 - RNA, 25 nt, Homo sapiens
  source 1..25: mol_type = unassigned RNA
ccaccgcgggccgcagagtccgagc

SEQ ID NO: 7117 - RNA, 25 nt, Homo sapiens
  source 1..25: mol_type = unassigned RNA
cccagcttcctcctgcaatgcttcc

SEQ ID NO: 7118 - RNA, 25 nt, Homo sapiens
  source 1..25: mol_type = unassigned RNA
ccagcttcctcctgcaatgcttcct

SEQ ID NO: 7119 - RNA, 25 nt, Homo sapiens
  source 1..25: mol_type = unassigned RNA
cagcttcctcctgcaatgcttcctg

SEQ ID NO: 7120 - RNA, 25 nt, Homo sapiens
  source 1..25: mol_type = unassigned RNA
agcttcctcctgcaatgcttcctgg

SEQ ID NO: 7121 - RNA, 25 nt, Homo sapiens
  source 1..25: mol_type = unassigned RNA
cctgcaatgcttcctgggggccctg

SEQ ID NO: 7122 - RNA, 25 nt, Homo sapiens
  source 1..25: mol_type = unassigned RNA
caatgcttcctgggggccctgtggc

SEQ ID NO: 7123 - RNA, 25 nt, Homo sapiens
  source 1..25: mol_type = unassigned RNA
tgggggccctgtggctggctctgag

SEQ ID NO: 7124 - RNA, 25 nt, Homo sapiens
  source 1..25: mol_type = unassigned RNA
tggctggctctgagtggcgaaatca

SEQ ID NO: 7125 - RNA, 25 nt, Homo sapiens
  source 1..25: mol_type = unassigned RNA
gctctgagtggcgaaatcaaggaca

SEQ ID NO: 7126 - RNA, 25 nt, Homo sapiens
  source 1..25: mol_type = unassigned RNA
cccgcagtacctagcattgacccca

SEQ ID NO: 7127 - RNA, 25 nt, Homo sapiens
  source 1..25: mol_type = unassigned RNA
cctagcattgaccccaaggaagaag

SEQ ID NO: 7128 - RNA, 25 nt, Homo sapiens
  source 1..25: mol_type = unassigned RNA
aaggaagaagaggccctatgacaac

SEQ ID NO: 7129 - RNA, 25 nt, Homo sapiens
  source 1..25: mol_type = unassigned RNA
aagaagaggccctatgacaactggc

SEQ ID NO: 7130 - RNA, 25 nt, Homo sapiens
  source 1..25: mol_type = unassigned RNA
aagaggccctatgacaactggctgg

SEQ ID NO: 7131 - RNA, 25 nt, Homo sapiens
  source 1..25: mol_type = unassigned RNA
agaggccctatgacaactggctgga

SEQ ID NO: 7132 - RNA, 25 nt, Homo sapiens
  source 1..25: mol_type = unassigned RNA
tggctggagggcgtgccacgctttc

SEQ ID NO: 7133 - RNA, 25 nt, Homo sapiens
  source 1..25: mol_type = unassigned RNA
tggagggcgtgccacgctttctggc

SEQ ID NO: 7134 - RNA, 25 nt, Homo sapiens
  source 1..25: mol_type = unassigned RNA
ggagggcgtgccacgctttctggct

SEQ ID NO: 7135 - RNA, 25 nt, Homo sapiens
  source 1..25: mol_type = unassigned RNA
atcttccagcctcccgcccgctgcc

SEQ ID NO: 7136 - RNA, 25 nt, Homo sapiens
  source 1..25: mol_type = unassigned RNA
tcttccagcctcccgcccgctgcct

SEQ ID NO: 7137 - RNA, 25 nt, Homo sapiens
  source 1..25: mol_type = unassigned RNA
ccgcccgctgcctgggagccctact

SEQ ID NO: 7138 - RNA, 25 nt, Homo sapiens
  source 1..25: mol_type = unassigned RNA
cgcccgctgcctgggagccctactc

SEQ ID NO: 7139 - RNA, 25 nt, Homo sapiens
  source 1..25: mol_type = unassigned RNA
tgcctgggagccctactcgggccat

SEQ ID NO: 7140 - RNA, 25 nt, Homo sapiens
  source 1..25: mol_type = unassigned RNA
ctgggagccctactcgggccatcgg

SEQ ID NO: 7141 - RNA, 25 nt, Homo sapiens
  source 1..25: mol_type = unassigned RNA
ctactcgggccatcggcggctgcct

SEQ ID NO: 7142 - RNA, 25 nt, Homo sapiens
  source 1..25: mol_type = unassigned RNA
ctcgggccatcggcggctgcctcgg

SEQ ID NO: 7143 - RNA, 25 nt, Homo sapiens
  source 1..25: mol_type = unassigned RNA
gccatcggcggctgcctcggtggac

SEQ ID NO: 7144 - RNA, 25 nt, Homo sapiens
  source 1..25: mol_type = unassigned RNA
gctgcctcggtggacaggaagcaga

SEQ ID NO: 7145 - RNA, 25 nt, Homo sapiens
  source 1..25: mol_type = unassigned RNA
ggacaggaagcagaaggtgcttgcg

SEQ ID NO: 7146 - RNA, 25 nt, Homo sapiens
  source 1..25: mol_type = unassigned RNA
gaaggtgcttgcgaggtacctgaag

SEQ ID NO: 7147 - RNA, 25 nt, Homo sapiens
  source 1..25: mol_type = unassigned RNA
gcgaggtacctgaagcggctgcagc

SEQ ID NO: 7148 - RNA, 25 nt, Homo sapiens
  source 1..25: mol_type = unassigned RNA
cgaggtacctgaagcggctgcagcc

SEQ ID NO: 7149 - RNA, 25 nt, Homo sapiens
  source 1..25: mol_type = unassigned RNA
gaggtacctgaagcggctgcagccg

SEQ ID NO: 7150 - RNA, 25 nt, Homo sapiens
  source 1..25: mol_type = unassigned RNA
gaagcggctgcagccggggacactg

SEQ ID NO: 7151 - RNA, 25 nt, Homo sapiens
  source 1..25: mol_type = unassigned RNA
aagcggctgcagccggggacactgc

SEQ ID NO: 7152 - RNA, 25 nt, Homo sapiens
  source 1..25: mol_type = unassigned RNA
gctgcagccggggacactgcgggcg

SEQ ID NO: 7153 - RNA, 25 nt, Homo sapiens
  source 1..25: mol_type = unassigned RNA
gggacactgcgggcgcggcagctgc

SEQ ID NO: 7154 - RNA, 25 nt, Homo sapiens
  source 1..25: mol_type = unassigned RNA
ctggagctgctgcactgcgcccacg

SEQ ID NO: 7155 - RNA, 25 nt, Homo sapiens
  source 1..25: mol_type = unassigned RNA
ctgctgcactgcgcccacgaggccg

SEQ ID NO: 7156 - RNA, 25 nt, Homo sapiens
  source 1..25: mol_type = unassigned RNA
ctgcactgcgcccacgaggccgagg

SEQ ID NO: 7157 - RNA, 25 nt, Homo sapiens
  source 1..25: mol_type = unassigned RNA
actgcgcccacgaggccgaggaggc

SEQ ID NO: 7158 - RNA, 25 nt, Homo sapiens
  source 1..25: mol_type = unassigned RNA
ccacgaggccgaggaggctggaatt

SEQ ID NO: 7159 - RNA, 25 nt, Homo sapiens
  source 1..25: mol_type = unassigned RNA
gaggaggctggaatttggcagcacg

SEQ ID NO: 7160 - RNA, 25 nt, Homo sapiens
  source 1..25: mol_type = unassigned RNA
gctggaatttggcagcacgtggtac

SEQ ID NO: 7161 - RNA, 25 nt, Homo sapiens
  source 1..25: mol_type = unassigned RNA
ggcagcacgtggtacaggagctccc

SEQ ID NO: 7162 - RNA, 25 nt, Homo sapiens
  source 1..25: mol_type = unassigned RNA
gagctccccggccgcctctcttttc

SEQ ID NO: 7163 - RNA, 25 nt, Homo sapiens
  source 1..25: mol_type = unassigned RNA
agctccccggccgcctctcttttct

SEQ ID NO: 7164 - RNA, 25 nt, Homo sapiens
  source 1..25: mol_type = unassigned RNA
ctcacgcctcctgatgcacatgtac

SEQ ID NO: 7165 - RNA, 25 nt, Homo sapiens
  source 1..25: mol_type = unassigned RNA
tcacgcctcctgatgcacatgtact

SEQ ID NO: 7166 - RNA, 25 nt, Homo sapiens
  source 1..25: mol_type = unassigned RNA
cctcctgatgcacatgtactgggca

SEQ ID NO: 7167 - RNA, 25 nt, Homo sapiens
  source 1..25: mol_type = unassigned RNA
gatgcacatgtactgggcaaggcct

SEQ ID NO: 7168 - RNA, 25 nt, Homo sapiens
  source 1..25: mol_type = unassigned RNA
gcacatgtactgggcaaggccttgg

SEQ ID NO: 7169 - RNA, 25 nt, Homo sapiens
  source 1..25: mol_type = unassigned RNA
catgtactgggcaaggccttggagg

SEQ ID NO: 7170 - RNA, 25 nt, Homo sapiens
  source 1..25: mol_type = unassigned RNA
gtactgggcaaggccttggaggcgg

SEQ ID NO: 7171 - RNA, 25 nt, Homo sapiens
  source 1..25: mol_type = unassigned RNA
tactgggcaaggccttggaggcggc

SEQ ID NO: 7172 - RNA, 25 nt, Homo sapiens
  source 1..25: mol_type = unassigned RNA
gaggcggcgggccaagacttctccc

SEQ ID NO: 7173 - RNA, 25 nt, Homo sapiens
  source 1..25: mol_type = unassigned RNA
acttctccctggacctccgcagcac

SEQ ID NO: 7174 - RNA, 25 nt, Homo sapiens
  source 1..25: mol_type = unassigned RNA
tccgcagcactggcatttgcccctc

SEQ ID NO: 7175 - RNA, 25 nt, Homo sapiens
  source 1..25: mol_type = unassigned RNA
agcactggcatttgcccctctggat

SEQ ID NO: 7176 - RNA, 25 nt, Homo sapiens
  source 1..25: mol_type = unassigned RNA
gcactggcatttgcccctctggatt

SEQ ID NO: 7177 - RNA, 25 nt, Homo sapiens
  source 1..25: mol_type = unassigned RNA
cactggcatttgcccctctggattg

SEQ ID NO: 7178 - RNA, 25 nt, Homo sapiens
  source 1..25: mol_type = unassigned RNA
tgcccctctggattggggagcctcg

SEQ ID NO: 7179 - RNA, 25 nt, Homo sapiens
  source 1..25: mol_type = unassigned RNA
gcccctctggattggggagcctcgt

SEQ ID NO: 7180 - RNA, 25 nt, Homo sapiens
  source 1..25: mol_type = unassigned RNA
gggactcagctgtgtcacccgtttc

SEQ ID NO: 7181 - RNA, 25 nt, Homo sapiens
  source 1..25: mol_type = unassigned RNA
actcagctgtgtcacccgtttcagg

SEQ ID NO: 7182 - RNA, 25 nt, Homo sapiens
  source 1..25: mol_type = unassigned RNA
ctcagctgtgtcacccgtttcaggt

SEQ ID NO: 7183 - RNA, 25 nt, Homo sapiens
  source 1..25: mol_type = unassigned RNA
tcagctgtgtcacccgtttcaggtg

SEQ ID NO: 7184 - RNA, 25 nt, Homo sapiens
  source 1..25: mol_type = unassigned RNA
tgtgtcacccgtttcaggtggggtg

SEQ ID NO: 7185 - RNA, 25 nt, Homo sapiens
  source 1..25: mol_type = unassigned RNA
gtgtcacccgtttcaggtggggtga

SEQ ID NO: 7186 - RNA, 25 nt, Homo sapiens
  source 1..25: mol_type = unassigned RNA
tgtcacccgtttcaggtggggtgag

SEQ ID NO: 7187 - RNA, 25 nt, Homo sapiens
  source 1..25: mol_type = unassigned RNA
cccgtttcaggtggggtgaggggct

SEQ ID NO: 7188 - RNA, 25 nt, Homo sapiens
  source 1..25: mol_type = unassigned RNA
ccgtttcaggtggggtgaggggctt

SEQ ID NO: 7189 - RNA, 25 nt, Homo sapiens
  source 1..25: mol_type = unassigned RNA
cgtttcaggtggggtgaggggcttg

SEQ ID NO: 7190 - RNA, 25 nt, Homo sapiens
  source 1..25: mol_type = unassigned RNA
gctccaccggctctgcaaaggccag

SEQ ID NO: 7191 - RNA, 25 nt, Homo sapiens
  source 1..25: mol_type = unassigned RNA
tgctccaccggctctgcaaaggcca

SEQ ID NO: 7192 - RNA, 25 nt, Homo sapiens
  source 1..25: mol_type = unassigned RNA
ctgctccaccggctctgcaaaggcc

SEQ ID NO: 7193 - RNA, 25 nt, Homo sapiens
  source 1..25: mol_type = unassigned RNA
tagaactgctccaccggctctgcaa

SEQ ID NO: 7194 - RNA, 25 nt, Homo sapiens
  source 1..25: mol_type = unassigned RNA
gcagtgagcggtagaactgctccac

SEQ ID NO: 7195 - RNA, 25 nt, Homo sapiens
  source 1..25: mol_type = unassigned RNA
ggcaccatacgtgtcctgcagtgag

SEQ ID NO: 7196 - RNA, 25 nt, Homo sapiens
  source 1..25: mol_type = unassigned RNA
aggatgccatccgggcctgcgggct

SEQ ID NO: 7197 - RNA, 25 nt, Homo sapiens
  source 1..25: mol_type = unassigned RNA
ggtctaggatgccatccgggcctgc

SEQ ID NO: 7198 - RNA, 25 nt, Homo sapiens
  source 1..25: mol_type = unassigned RNA
aggtctaggatgccatccgggcctg

SEQ ID NO: 7199 - RNA, 25 nt, Homo sapiens
  source 1..25: mol_type = unassigned RNA
taggtggaggtctaggatgccatcc

SEQ ID NO: 7200 - RNA, 25 nt, Homo sapiens
  source 1..25: mol_type = unassigned RNA
ctaggtggaggtctaggatgccatc

SEQ ID NO: 7201 - RNA, 25 nt, Homo sapiens
  source 1..25: mol_type = unassigned RNA
ccggacgtggtctaggtggaggtct

SEQ ID NO: 7202 - RNA, 25 nt, Homo sapiens
  source 1..25: mol_type = unassigned RNA
agctgccgttctgcccagtccgggg

SEQ ID NO: 7203 - RNA, 25 nt, Homo sapiens
  source 1..25: mol_type = unassigned RNA
gccagctgccgttctgcccagtccg

SEQ ID NO: 7204 - RNA, 25 nt, Homo sapiens
  source 1..25: mol_type = unassigned RNA
ggccagctgccgttctgcccagtcc

SEQ ID NO: 7205 - RNA, 25 nt, Homo sapiens
  source 1..25: mol_type = unassigned RNA
gggccagctgccgttctgcccagtc

SEQ ID NO: 7206 - RNA, 25 nt, Homo sapiens
  source 1..25: mol_type = unassigned RNA
aacagcacctcagccaggcctcctt

SEQ ID NO: 7207 - RNA, 25 nt, Homo sapiens
  source 1..25: mol_type = unassigned RNA
caacagcacctcagccaggcctcct

SEQ ID NO: 7208 - RNA, 25 nt, Homo sapiens
  source 1..25: mol_type = unassigned RNA
cttggcagccaacagcacctcagcc

SEQ ID NO: 7209 - RNA, 25 nt, Homo sapiens
  source 1..25: mol_type = unassigned RNA
gtctcacgcggccgccggtgctcct

SEQ ID NO: 7210 - RNA, 25 nt, Homo sapiens
  source 1..25: mol_type = unassigned RNA
aatcactcgtgtctcacgcggccgc

SEQ ID NO: 7211 - RNA, 25 nt, Homo sapiens
  source 1..25: mol_type = unassigned RNA
gcacagcaatcactcgtgtctcacg

SEQ ID NO: 7212 - RNA, 25 nt, Homo sapiens
  source 1..25: mol_type = unassigned RNA
gggaagccggccacaagcccaggcc

SEQ ID NO: 7213 - RNA, 25 nt, Homo sapiens
  source 1..25: mol_type = unassigned RNA
tactggggaagccggccacaagccc

SEQ ID NO: 7214 - RNA, 25 nt, Homo sapiens
  source 1..25: mol_type = unassigned RNA
gaagacaaagtcgtactggggaagc

SEQ ID NO: 7215 - RNA, 25 nt, Homo sapiens
  source 1..25: mol_type = unassigned RNA
ggacagagaagacaaagtcgtactg

SEQ ID NO: 7216 - RNA, 25 nt, Homo sapiens
  source 1..25: mol_type = unassigned RNA
gggacagagaagacaaagtcgtact

SEQ ID NO: 7217 - RNA, 25 nt, Homo sapiens
  source 1..25: mol_type = unassigned RNA
ggggacagagaagacaaagtcgtac

SEQ ID NO: 7218 - RNA, 25 nt, Homo sapiens
  source 1..25: mol_type = unassigned RNA
ccccggacggttcaagcaatggcag

SEQ ID NO: 7219 - RNA, 25 nt, Homo sapiens
  source 1..25: mol_type = unassigned RNA
cccccggacggttcaagcaatggca

SEQ ID NO: 7220 - RNA, 25 nt, Homo sapiens
  source 1..25: mol_type = unassigned RNA
tcccccggacggttcaagcaatggc

SEQ ID NO: 7221 - RNA, 25 nt, Homo sapiens
  source 1..25: mol_type = unassigned RNA
ggcatcccccggacggttcaagcaa

SEQ ID NO: 7222 - RNA, 25 nt, Homo sapiens
  source 1..25: mol_type = unassigned RNA
ctgcaggccataggcatcccccgga

SEQ ID NO: 7223 - RNA, 25 nt, Homo sapiens
  source 1..25: mol_type = unassigned RNA
gatcctgcaggccataggcatcccc

SEQ ID NO: 7224 - RNA, 25 nt, Homo sapiens
  source 1..25: mol_type = unassigned RNA
gagaagagcagatcctgcaggccat

SEQ ID NO: 7225 - RNA, 25 nt, Homo sapiens
  source 1..25: mol_type = unassigned RNA
gcccagggagaagagcagatcctgc

SEQ ID NO: 7226 - RNA, 25 nt, Homo sapiens
  source 1..25: mol_type = unassigned RNA
gccgccacgagtggctgtgggccca

SEQ ID NO: 7227 - RNA, 25 nt, Homo sapiens
  source 1..25: mol_type = unassigned RNA
ggccgccacgagtggctgtgggccc

SEQ ID NO: 7228 - RNA, 25 nt, Homo sapiens
  source 1..25: mol_type = unassigned RNA
ctcatcggccgccacgagtggctgt

SEQ ID NO: 7229 - RNA, 25 nt, Homo sapiens
  source 1..25: mol_type = unassigned RNA
cctcatcggccgccacgagtggctg

SEQ ID NO: 7230 - RNA, 25 nt, Homo sapiens
  source 1..25: mol_type = unassigned RNA
tgaaaacctcatcggccgccacgag

SEQ ID NO: 7231 - RNA, 25 nt, Homo sapiens
  source 1..25: mol_type = unassigned RNA
ttcaagatgtggctgaaaacctcat

SEQ ID NO: 7232 - RNA, 25 nt, Homo sapiens
  source 1..25: mol_type = unassigned RNA
aacgcggtcaggtctcttcaagatg

SEQ ID NO: 7233 - RNA, 25 nt, Homo sapiens
  source 1..25: mol_type = unassigned RNA
cgtctaggatgagcagaacgcggtc

SEQ ID NO: 7234 - RNA, 25 nt, Homo sapiens
  source 1..25: mol_type = unassigned RNA
gaagccgtctaggatgagcagaacg

SEQ ID NO: 7235 - RNA, 25 nt, Homo sapiens
  source 1..25: mol_type = unassigned RNA
cgcttccagctcctcgaagccgtct

SEQ ID NO: 7236 - RNA, 25 nt, Homo sapiens
  source 1..25: mol_type = unassigned RNA
cggtgccggtccgcacgtgctgtgc

SEQ ID NO: 7237 - RNA, 25 nt, Homo sapiens
  source 1..25: mol_type = unassigned RNA
ggagggagcagggctccgccggtgc

SEQ ID NO: 7238 - RNA, 25 nt, Homo sapiens
  source 1..25: mol_type = unassigned RNA
gcccccggagggagcagggctccgc

SEQ ID NO: 7239 - RNA, 25 nt, Homo sapiens
  source 1..25: mol_type = unassigned RNA
cggccagcagcccccggagggagca

SEQ ID NO: 7240 - RNA, 25 nt, Homo sapiens
  source 1..25: mol_type = unassigned RNA
ccggccagcagcccccggagggagc

SEQ ID NO: 7241 - RNA, 25 nt, Homo sapiens
  source 1..25: mol_type = unassigned RNA
aaaaggccggccagcagcccccgga

SEQ ID NO: 7242 - RNA, 25 nt, Homo sapiens
  source 1..25: mol_type = unassigned RNA
gaaaaggccggccagcagcccccgg

SEQ ID NO: 7243 - RNA, 25 nt, Homo sapiens
  source 1..25: mol_type = unassigned RNA
ctggaaaaggccggccagcagcccc

SEQ ID NO: 7244 - RNA, 25 nt, Homo sapiens
  source 1..25: mol_type = unassigned RNA
cggagcagcttcttctggaaaaggc

SEQ ID NO: 7245 - RNA, 25 nt, Homo sapiens
  source 1..25: mol_type = unassigned RNA
acctcggagcagcttcttctggaaa

SEQ ID NO: 7246 - RNA, 25 nt, Homo sapiens
  source 1..25: mol_type = unassigned RNA
ggtgcaacctcggagcagcttcttc

SEQ ID NO: 7247 - RNA, 25 nt, Homo sapiens
  source 1..25: mol_type = unassigned RNA
ggctgtgaggaggagggtgcaacct

SEQ ID NO: 7248 - RNA, 25 nt, Homo sapiens
  source 1..25: mol_type = unassigned RNA
ccccggggccgggctgtgaggagga

SEQ ID NO: 7249 - RNA, 25 nt, Homo sapiens
  source 1..25: mol_type = unassigned RNA
gccccggggccgggctgtgaggagg

SEQ ID NO: 7250 - RNA, 25 nt, Homo sapiens
  source 1..25: mol_type = unassigned RNA
gcggccccggggccgggctgtgagg

SEQ ID NO: 7251 - RNA, 25 nt, Homo sapiens
  source 1..25: mol_type = unassigned RNA
caggcggccccggggccgggctgtg

SEQ ID NO: 7252 - RNA, 25 nt, Homo sapiens
  source 1..25: mol_type = unassigned RNA
ctctggaccaggcggccccggggcc

SEQ ID NO: 7253 - RNA, 25 nt, Homo sapiens
  source 1..25: mol_type = unassigned RNA
gctctggaccaggcggccccggggc

SEQ ID NO: 7254 - RNA, 25 nt, Homo sapiens
  source 1..25: mol_type = unassigned RNA
tcaggctctggaccaggcggccccg

SEQ ID NO: 7255 - RNA, 25 nt, Homo sapiens
  source 1..25: mol_type = unassigned RNA
ctcaggctctggaccaggcggcccc

SEQ ID NO: 7256 - RNA, 25 nt, Homo sapiens
  source 1..25: mol_type = unassigned RNA
gctcaggctctggaccaggcggccc

SEQ ID NO: 7257 - RNA, 25 nt, Homo sapiens
  source 1..25: mol_type = unassigned RNA
ggccttgctcaggctctggaccagg

SEQ ID NO: 7258 - RNA, 25 nt, Homo sapiens
  source 1..25: mol_type = unassigned RNA
gtcggccttgctcaggctctggacc

SEQ ID NO: 7259 - RNA, 25 nt, Homo sapiens
  source 1..25: mol_type = unassigned RNA
tagggcgtcggccttgctcaggctc

SEQ ID NO: 7260 - RNA, 25 nt, Homo sapiens
  source 1..25: mol_type = unassigned RNA
ctcaaatagggcgtcggccttgctc

SEQ ID NO: 7261 - RNA, 25 nt, Homo sapiens
  source 1..25: mol_type = unassigned RNA
aagccggacagctcaaatagggcgt

SEQ ID NO: 7262 - RNA, 25 nt, Homo sapiens
  source 1..25: mol_type = unassigned RNA
atggagaagccggacagctcaaata

SEQ ID NO: 7263 - RNA, 25 nt, Homo sapiens
  source 1..25: mol_type = unassigned RNA
catggagaagccggacagctcaaat

SEQ ID NO: 7264 - RNA, 25 nt, Homo sapiens
  source 1..25: mol_type = unassigned RNA
gcctgggcctgctccatggagaagc

SEQ ID NO: 7265 - RNA, 25 nt, Homo sapiens
  source 1..25: mol_type = unassigned RNA
atcacgtatgcctgggcctgctcca

SEQ ID NO: 7266 - RNA, 25 nt, Homo sapiens
  source 1..25: mol_type = unassigned RNA
tcaaagtagcgcatcacgtatgcct

SEQ ID NO: 7267 - RNA, 25 nt, Homo sapiens
  source 1..25: mol_type = unassigned RNA
ctcaaagtagcgcatcacgtatgcc

SEQ ID NO: 7268 - RNA, 25 nt, Homo sapiens
  source 1..25: mol_type = unassigned RNA
ccggaggagcgtcagggctctgtct

SEQ ID NO: 7269 - RNA, 25 nt, Homo sapiens
  source 1..25: mol_type = unassigned RNA
agtggccggtcccggaggagcgtca

SEQ ID NO: 7270 - RNA, 25 nt, Homo sapiens
  source 1..25: mol_type = unassigned RNA
aagtggccggtcccggaggagcgtc

SEQ ID NO: 7271 - RNA, 25 nt, Homo sapiens
  source 1..25: mol_type = unassigned RNA
actgagaagaagtggccggtcccgg

SEQ ID NO: 7272 - RNA, 25 nt, Homo sapiens
  source 1..25: mol_type = unassigned RNA
gtgactgagaagaagtggccggtcc

SEQ ID NO: 7273 - RNA, 25 nt, Homo sapiens
  source 1..25: mol_type = unassigned RNA
gtggctgtgactgagaagaagtggc

SEQ ID NO: 7274 - RNA, 25 nt, Homo sapiens
  source 1..25: mol_type = unassigned RNA
ggctgtggctgtgactgagaagaag

SEQ ID NO: 7275 - RNA, 25 nt, Homo sapiens
  source 1..25: mol_type = unassigned RNA
cactgcccggcacaaagtagggctg

SEQ ID NO: 7276 - RNA, 25 nt, Homo sapiens
  source 1..25: mol_type = unassigned RNA
ctggcacactgcccggcacaaagta

SEQ ID NO: 7277 - RNA, 25 nt, Homo sapiens
  source 1..25: mol_type = unassigned RNA
gctggcacactgcccggcacaaagt

SEQ ID NO: 7278 - RNA, 25 nt, Homo sapiens
  source 1..25: mol_type = unassigned RNA
ggcctctgagagctggcacactgcc

SEQ ID NO: 7279 - RNA, 25 nt, Homo sapiens
  source 1..25: mol_type = unassigned RNA
aagctccagcagggcctctgagagc

SEQ ID NO: 7280 - RNA, 25 nt, Homo sapiens
  source 1..25: mol_type = unassigned RNA
ttggcgtcctccccaagctccagca

SEQ ID NO: 7281 - RNA, 25 nt, Homo sapiens
  source 1..25: mol_type = unassigned RNA
cttggcgtcctccccaagctccagc

SEQ ID NO: 7282 - RNA, 25 nt, Homo sapiens
  source 1..25: mol_type = unassigned RNA
agtcccgtgagcgtggagggcagct

SEQ ID NO: 7283 - RNA, 25 nt, Homo sapiens
  source 1..25: mol_type = unassigned RNA
cgacatagagtcccgtgagcgtgga

SEQ ID NO: 7284 - RNA, 25 nt, Homo sapiens
  source 1..25: mol_type = unassigned RNA
ccgacatagagtcccgtgagcgtgg

SEQ ID NO: 7285 - RNA, 25 nt, Homo sapiens
  source 1..25: mol_type = unassigned RNA
aggccgacatagagtcccgtgagcg

SEQ ID NO: 7286 - RNA, 25 nt, Homo sapiens
  source 1..25: mol_type = unassigned RNA
gctgtcgagggctgcacggcccagc

SEQ ID NO: 7287 - RNA, 25 nt, Homo sapiens
  source 1..25: mol_type = unassigned RNA
cccgggggggctgtcgagggctgca

SEQ ID NO: 7288 - RNA, 25 nt, Homo sapiens
  source 1..25: mol_type = unassigned RNA
gccagggccccgggggggctgtcga

SEQ ID NO: 7289 - RNA, 25 nt, Homo sapiens
  source 1..25: mol_type = unassigned RNA
tgccagggccccgggggggctgtcg

SEQ ID NO: 7290 - RNA, 25 nt, Homo sapiens
  source 1..25: mol_type = unassigned RNA
ggccagctctgccagggccccgggg

SEQ ID NO: 7291 - RNA, 25 nt, Homo sapiens
  source 1..25: mol_type = unassigned RNA
tggccagctctgccagggccccggg

SEQ ID NO: 7292 - RNA, 25 nt, Homo sapiens
  source 1..25: mol_type = unassigned RNA
ttggccagctctgccagggccccgg

SEQ ID NO: 7293 - RNA, 25 nt, Homo sapiens
  source 1..25: mol_type = unassigned RNA
cttggccagctctgccagggccccg

SEQ ID NO: 7294 - RNA, 25 nt, Homo sapiens
  source 1..25: mol_type = unassigned RNA
gcttggccagctctgccagggcccc

SEQ ID NO: 7295 - RNA, 25 nt, Homo sapiens
  source 1..25: mol_type = unassigned RNA
agcttggccagctctgccagggccc

SEQ ID NO: 7296 - RNA, 25 nt, Homo sapiens
  source 1..25: mol_type = unassigned RNA
caggccagcttggccagctctgcca

SEQ ID NO: 7297 - RNA, 25 nt, Homo sapiens
  source 1..25: mol_type = unassigned RNA
ccaggccagcttggccagctctgcc

SEQ ID NO: 7298 - RNA, 25 nt, Homo sapiens
  source 1..25: mol_type = unassigned RNA
ctgcggcccagctcccaggccagct

SEQ ID NO: 7299 - RNA, 25 nt, Homo sapiens
  source 1..25: mol_type = unassigned RNA
ctttgatgtctgcggcccagctccc

SEQ ID NO: 7300 - RNA, 25 nt, Homo sapiens
  source 1..25: mol_type = unassigned RNA
ctcctgtagggtactttgatgtctg

SEQ ID NO: 7301 - RNA, 25 nt, Homo sapiens
  source 1..25: mol_type = unassigned RNA
gcggatgggaactggtcctcctgta

SEQ ID NO: 7302 - RNA, 25 nt, Homo sapiens
  source 1..25: mol_type = unassigned RNA
tgcggatgggaactggtcctcctgt

SEQ ID NO: 7303 - RNA, 25 nt, Homo sapiens
  source 1..25: mol_type = unassigned RNA
ggtcctcacgtctgcggatgggaac

SEQ ID NO: 7304 - RNA, 25 nt, Homo sapiens
  source 1..25: mol_type = unassigned RNA
cgcccaggtcctcacgtctgcggat

SEQ ID NO: 7305 - RNA, 25 nt, Homo sapiens
  source 1..25: mol_type = unassigned RNA
tcgcccaggtcctcacgtctgcgga

SEQ ID NO: 7306 - RNA, 25 nt, Homo sapiens
  source 1..25: mol_type = unassigned RNA
gccatcgcccaggtcctcacgtctg

SEQ ID NO: 7307 - RNA, 25 nt, Homo sapiens
  source 1..25: mol_type = unassigned RNA
tggactaagcctttggccatcgccc

SEQ ID NO: 7308 - RNA, 25 nt, Homo sapiens
  source 1..25: mol_type = unassigned RNA
cgcggtgggtgttggactaagcctt

SEQ ID NO: 7309 - RNA, 25 nt, Homo sapiens
  source 1..25: mol_type = unassigned RNA
ggactctgcggcccgcggtgggtgt

SEQ ID NO: 7310 - RNA, 25 nt, Homo sapiens
  source 1..25: mol_type = unassigned RNA
cagctcggactctgcggcccgcggt

SEQ ID NO: 7311 - RNA, 25 nt, Homo sapiens
  source 1..25: mol_type = unassigned RNA
ccagctcggactctgcggcccgcgg

SEQ ID NO: 7312 - RNA, 25 nt, Homo sapiens
  source 1..25: mol_type = unassigned RNA
aggccagctcggactctgcggcccg

SEQ ID NO: 7313 - RNA, 25 nt, Homo sapiens
  source 1..25: mol_type = unassigned RNA
ctggggaaggccagctcggactctg

SEQ ID NO: 7314 - RNA, 25 nt, Homo sapiens
  source 1..25: mol_type = unassigned RNA
aggaggaagctggggaaggccagct

SEQ ID NO: 7315 - RNA, 25 nt, Homo sapiens
  source 1..25: mol_type = unassigned RNA
aagcattgcaggaggaagctgggga

SEQ ID NO: 7316 - RNA, 25 nt, Homo sapiens
  source 1..25: mol_type = unassigned RNA
caggaagcattgcaggaggaagctg

SEQ ID NO: 7317 - RNA, 25 nt, Homo sapiens
  source 1..25: mol_type = unassigned RNA
ccaggaagcattgcaggaggaagct

SEQ ID NO: 7318 - RNA, 25 nt, Homo sapiens
  source 1..25: mol_type = unassigned RNA
cccaggaagcattgcaggaggaagc

SEQ ID NO: 7319 - RNA, 25 nt, Homo sapiens
  source 1..25: mol_type = unassigned RNA
cagggcccccaggaagcattgcagg

SEQ ID NO: 7320 - RNA, 25 nt, Homo sapiens
  source 1..25: mol_type = unassigned RNA
ccacagggcccccaggaagcattgc

SEQ ID NO: 7321 - RNA, 25 nt, Homo sapiens
  source 1..25: mol_type = unassigned RNA
actcagagccagccacagggccccc

SEQ ID NO: 7322 - RNA, 25 nt, Homo sapiens
  source 1..25: mol_type = unassigned RNA
atttcgccactcagagccagccaca

SEQ ID NO: 7323 - RNA, 25 nt, Homo sapiens
  source 1..25: mol_type = unassigned RNA
gatttcgccactcagagccagccac

SEQ ID NO: 7324 - RNA, 25 nt, Homo sapiens
  source 1..25: mol_type = unassigned RNA
ccttggggtcaatgctaggtactgc

SEQ ID NO: 7325 - RNA, 25 nt, Homo sapiens
  source 1..25: mol_type = unassigned RNA
tccttggggtcaatgctaggtactg

SEQ ID NO: 7326 - RNA, 25 nt, Homo sapiens
  source 1..25: mol_type = unassigned RNA
cctcttcttccttggggtcaatgct

SEQ ID NO: 7327 - RNA, 25 nt, Homo sapiens
  source 1..25: mol_type = unassigned RNA
ttgtcatagggcctcttcttccttg

SEQ ID NO: 7328 - RNA, 25 nt, Homo sapiens
  source 1..25: mol_type = unassigned RNA
gttgtcatagggcctcttcttcctt

SEQ ID NO: 7329 - RNA, 25 nt, Homo sapiens
  source 1..25: mol_type = unassigned RNA
agttgtcatagggcctcttcttcct

SEQ ID NO: 7330 - RNA, 25 nt, Homo sapiens
  source 1..25: mol_type = unassigned RNA
gcacgccctccagccagttgtcata

SEQ ID NO: 7331 - RNA, 25 nt, Homo sapiens
  source 1..25: mol_type = unassigned RNA
ggcacgccctccagccagttgtcat

SEQ ID NO: 7332 - RNA, 25 nt, Homo sapiens
  source 1..25: mol_type = unassigned RNA
ggaagatcagcccagccagaaagcg

SEQ ID NO: 7333 - RNA, 25 nt, Homo sapiens
  source 1..25: mol_type = unassigned RNA
ggctcccaggcagcgggcgggaggc

SEQ ID NO: 7334 - RNA, 25 nt, Homo sapiens
  source 1..25: mol_type = unassigned RNA
gtagggctcccaggcagcgggcggg

SEQ ID NO: 7335 - RNA, 25 nt, Homo sapiens
  source 1..25: mol_type = unassigned RNA
cgagtagggctcccaggcagcgggc

SEQ ID NO: 7336 - RNA, 25 nt, Homo sapiens
  source 1..25: mol_type = unassigned RNA
ccgagtagggctcccaggcagcggg

SEQ ID NO: 7337 - RNA, 25 nt, Homo sapiens
  source 1..25: mol_type = unassigned RNA
ggcccgagtagggctcccaggcagc

SEQ ID NO: 7338 - RNA, 25 nt, Homo sapiens
  source 1..25: mol_type = unassigned RNA
tggcccgagtagggctcccaggcag

SEQ ID NO: 7339 - RNA, 25 nt, Homo sapiens
  source 1..25: mol_type = unassigned RNA
cgccgatggcccgagtagggctccc

SEQ ID NO: 7340 - RNA, 25 nt, Homo sapiens
  source 1..25: mol_type = unassigned RNA
gaggcagccgccgatggcccgagta

SEQ ID NO: 7341 - RNA, 25 nt, Homo sapiens
  source 1..25: mol_type = unassigned RNA
cgaggcagccgccgatggcccgagt

SEQ ID NO: 7342 - RNA, 25 nt, Homo sapiens
  source 1..25: mol_type = unassigned RNA
tcctgtccaccgaggcagccgccga

SEQ ID NO: 7343 - RNA, 25 nt, Homo sapiens
  source 1..25: mol_type = unassigned RNA
agcaccttctgcttcctgtccaccg

SEQ ID NO: 7344 - RNA, 25 nt, Homo sapiens
  source 1..25: mol_type = unassigned RNA
cagtgtccccggctgcagccgcttc

SEQ ID NO: 7345 - RNA, 25 nt, Homo sapiens
  source 1..25: mol_type = unassigned RNA
gcagctgccgcgcccgcagtgtccc

SEQ ID NO: 7346 - RNA, 25 nt, Homo sapiens
  source 1..25: mol_type = unassigned RNA
caaattccagcctcctcggcctcgt

SEQ ID NO: 7347 - RNA, 25 nt, Homo sapiens
  source 1..25: mol_type = unassigned RNA
ccaaattccagcctcctcggcctcg

SEQ ID NO: 7348 - RNA, 25 nt, Homo sapiens
  source 1..25: mol_type = unassigned RNA
acgtgctgccaaattccagcctcct

SEQ ID NO: 7349 - RNA, 25 nt, Homo sapiens
  source 1..25: mol_type = unassigned RNA
ggtgcccagaaaagagaggcggccg

SEQ ID NO: 7350 - RNA, 25 nt, Homo sapiens
  source 1..25: mol_type = unassigned RNA
gggtgcccagaaaagagaggcggcc

SEQ ID NO: 7351 - RNA, 25 nt, Homo sapiens
  source 1..25: mol_type = unassigned RNA
cgggtgcccagaaaagagaggcggc

SEQ ID NO: 7352 - RNA, 25 nt, Homo sapiens
  source 1..25: mol_type = unassigned RNA
gaggcgggtgcccagaaaagagagg

SEQ ID NO: 7353 - RNA, 25 nt, Homo sapiens
  source 1..25: mol_type = unassigned RNA
cgtgaggcgggtgcccagaaaagag

SEQ ID NO: 7354 - RNA, 25 nt, Homo sapiens
  source 1..25: mol_type = unassigned RNA
acatgtgcatcaggaggcgtgaggc

SEQ ID NO: 7355 - RNA, 25 nt, Homo sapiens
  source 1..25: mol_type = unassigned RNA
tacatgtgcatcaggaggcgtgagg

SEQ ID NO: 7356 - RNA, 25 nt, Homo sapiens
  source 1..25: mol_type = unassigned RNA
cagtacatgtgcatcaggaggcgtg

SEQ ID NO: 7357 - RNA, 25 nt, Homo sapiens
  source 1..25: mol_type = unassigned RNA
ccttgcccagtacatgtgcatcagg

SEQ ID NO: 7358 - RNA, 25 nt, Homo sapiens
  source 1..25: mol_type = unassigned RNA
aggccttgcccagtacatgtgcatc

SEQ ID NO: 7359 - RNA, 25 nt, Homo sapiens
  source 1..25: mol_type = unassigned RNA
gagaagtcttggcccgccgcctcca

SEQ ID NO: 7360 - RNA, 25 nt, Homo sapiens
  source 1..25: mol_type = unassigned RNA
gctgcggaggtccagggagaagtct

SEQ ID NO: 7361 - RNA, 25 nt, Homo sapiens
  source 1..25: mol_type = unassigned RNA
caaatgccagtgctgcggaggtcca

SEQ ID NO: 7362 - RNA, 25 nt, Homo sapiens
  source 1..25: mol_type = unassigned RNA
gcaaatgccagtgctgcggaggtcc

SEQ ID NO: 7363 - RNA, 25 nt, Homo sapiens
  source 1..25: mol_type = unassigned RNA
agaggggcaaatgccagtgctgcgg

SEQ ID NO: 7364 - RNA, 25 nt, Homo sapiens
  source 1..25: mol_type = unassigned RNA
tccagaggggcaaatgccagtgctg

SEQ ID NO: 7365 - RNA, 25 nt, Homo sapiens
  source 1..25: mol_type = unassigned RNA
tcccacgaggctccccaatccagag

SEQ ID NO: 7366 - RNA, 25 nt, Homo sapiens
  source 1..25: mol_type = unassigned RNA
gtcccacgaggctccccaatccaga

SEQ ID NO: 7367 - RNA, 25 nt, Homo sapiens
  source 1..25: mol_type = unassigned RNA
agtcccacgaggctccccaatccag

SEQ ID NO: 7368 - RNA, 25 nt, Homo sapiens
  source 1..25: mol_type = unassigned RNA
acgggtgacacagctgagtcccacg

SEQ ID NO: 7369 - RNA, 25 nt, Homo sapiens
  source 1..25: mol_type = unassigned RNA
ccaagcccctcaccccacctgaaac

SEQ ID NO: 7370 - RNA, 25 nt, Homo sapiens
  source 1..25: mol_type = unassigned RNA
cccaagcccctcaccccacctgaaa

SEQ ID NO: 7371 - RNA, 25 nt, Homo sapiens
  source 1..25: mol_type = unassigned RNA
gctgcccttccattaaggtctagcc

SEQ ID NO: 7372 - RNA, 25 nt, Homo sapiens
  source 1..25: mol_type = unassigned RNA
taaggtctagcctggtcaccgtgcc

SEQ ID NO: 7373 - RNA, 25 nt, Homo sapiens
  source 1..25: mol_type = unassigned RNA
aaggtctagcctggtcaccgtgcct

SEQ ID NO: 7374 - RNA, 25 nt, Homo sapiens
  source 1..25: mol_type = unassigned RNA
agcctggtcaccgtgcctgggtctg

SEQ ID NO: 7375 - RNA, 25 nt, Homo sapiens
  source 1..25: mol_type = unassigned RNA
cctgggtctgaggccctccctccac

SEQ ID NO: 7376 - RNA, 25 nt, Homo sapiens
  source 1..25: mol_type = unassigned RNA
ctgggtctgaggccctccctccaca

SEQ ID NO: 7377 - RNA, 25 nt, Homo sapiens
  source 1..25: mol_type = unassigned RNA
ctccacagggctgccttgagcgaca

SEQ ID NO: 7378 - RNA, 25 nt, Homo sapiens
  source 1..25: mol_type = unassigned RNA
cacagggctgccttgagcgacacgg

SEQ ID NO: 7379 - RNA, 25 nt, Homo sapiens
  source 1..25: mol_type = unassigned RNA
tgccttgagcgacacggtggcgctg

SEQ ID NO: 7380 - RNA, 25 nt, Homo sapiens
  source 1..25: mol_type = unassigned RNA
gccttgagcgacacggtggcgctgt

SEQ ID NO: 7381 - RNA, 25 nt, Homo sapiens
  source 1..25: mol_type = unassigned RNA
cgctgtgggagtccctgcagcagca

SEQ ID NO: 7382 - RNA, 25 nt, Homo sapiens
  source 1..25: mol_type = unassigned RNA
gctgtgggagtccctgcagcagcat

SEQ ID NO: 7383 - RNA, 25 nt, Homo sapiens
  source 1..25: mol_type = unassigned RNA
ctgtgggagtccctgcagcagcatg

SEQ ID NO: 7384 - RNA, 25 nt, Homo sapiens
  source 1..25: mol_type = unassigned RNA
cagcatggggagaccaagctacttc

SEQ ID NO: 7385 - RNA, 25 nt, Homo sapiens
  source 1..25: mol_type = unassigned RNA
gagaccaagctacttcaggcagcag

SEQ ID NO: 7386 - RNA, 25 nt, Homo sapiens
  source 1..25: mol_type = unassigned RNA
gagcctttcaaagccaagtccctga

SEQ ID NO: 7387 - RNA, 25 nt, Homo sapiens
  source 1..25: mol_type = unassigned RNA
ttcaaagccaagtccctgaaggatg

SEQ ID NO: 7388 - RNA, 25 nt, Homo sapiens
  source 1..25: mol_type = unassigned RNA
aagtccctgaaggatgtggaagacc

SEQ ID NO: 7389 - RNA, 25 nt, Homo sapiens
  source 1..25: mol_type = unassigned RNA
agtccctgaaggatgtggaagacct

SEQ ID NO: 7390 - RNA, 25 nt, Homo sapiens
  source 1..25: mol_type = unassigned RNA
cctgggaaagcttgtgcagactcag

SEQ ID NO: 7391 - RNA, 25 nt, Homo sapiens
  source 1..25: mol_type = unassigned RNA
aagcttgtgcagactcagaggtgag

SEQ ID NO: 7392 - RNA, 25 nt, Homo sapiens
  source 1..25: mol_type = unassigned RNA
tgtgcagactcagaggtgagaggag

SEQ ID NO: 7393 - RNA, 25 nt, Homo sapiens
  source 1..25: mol_type = unassigned RNA
gcagactcagaggtgagaggagagg

SEQ ID NO: 7394 - RNA, 25 nt, Homo sapiens
  source 1..25: mol_type = unassigned RNA
actcagaggtgagaggagaggcgga

SEQ ID NO: 7395 - RNA, 25 nt, Homo sapiens
  source 1..25: mol_type = unassigned RNA
gtgaccaggctagaccttaatggaa

SEQ ID NO: 7396 - RNA, 25 nt, Homo sapiens
  source 1..25: mol_type = unassigned RNA
ggtgaccaggctagaccttaatgga

SEQ ID NO: 7397 - RNA, 25 nt, Homo sapiens
  source 1..25: mol_type = unassigned RNA
gcacggtgaccaggctagaccttaa

SEQ ID NO: 7398 - RNA, 25 nt, Homo sapiens
  source 1..25: mol_type = unassigned RNA
ggcctcagacccaggcacggtgacc

SEQ ID NO: 7399 - RNA, 25 nt, Homo sapiens
  source 1..25: mol_type = unassigned RNA
ggagggagggcctcagacccaggca

SEQ ID NO: 7400 - RNA, 25 nt, Homo sapiens
  source 1..25: mol_type = unassigned RNA
cctgtggagggagggcctcagaccc

SEQ ID NO: 7401 - RNA, 25 nt, Homo sapiens
  source 1..25: mol_type = unassigned RNA
cgctcaaggcagccctgtggaggga

SEQ ID NO: 7402 - RNA, 25 nt, Homo sapiens
  source 1..25: mol_type = unassigned RNA
tcgctcaaggcagccctgtggaggg

SEQ ID NO: 7403 - RNA, 25 nt, Homo sapiens
  source 1..25: mol_type = unassigned RNA
gtgtcgctcaaggcagccctgtgga

SEQ ID NO: 7404 - RNA, 25 nt, Homo sapiens
  source 1..25: mol_type = unassigned RNA
cgtgtcgctcaaggcagccctgtgg

SEQ ID NO: 7405 - RNA, 25 nt, Homo sapiens
  source 1..25: mol_type = unassigned RNA
caccgtgtcgctcaaggcagccctg

SEQ ID NO: 7406 - RNA, 25 nt, Homo sapiens
  source 1..25: mol_type = unassigned RNA
tcccacagcgccaccgtgtcgctca

SEQ ID NO: 7407 - RNA, 25 nt, Homo sapiens
  source 1..25: mol_type = unassigned RNA
agcttggtctccccatgctgctgca

SEQ ID NO: 7408 - RNA, 25 nt, Homo sapiens
  source 1..25: mol_type = unassigned RNA
tagcttggtctccccatgctgctgc

SEQ ID NO: 7409 - RNA, 25 nt, Homo sapiens
  source 1..25: mol_type = unassigned RNA
ttctcctctgctgcctgaagtagct

SEQ ID NO: 7410 - RNA, 25 nt, Homo sapiens
  source 1..25: mol_type = unassigned RNA
agggacttggctttgaaaggctcga

SEQ ID NO: 7411 - RNA, 25 nt, Homo sapiens
  source 1..25: mol_type = unassigned RNA
catccttcagggacttggctttgaa

SEQ ID NO: 7412 - RNA, 25 nt, Homo sapiens
  source 1..25: mol_type = unassigned RNA
aggtcttccacatccttcagggact

SEQ ID NO: 7413 - RNA, 25 nt, Homo sapiens
  source 1..25: mol_type = unassigned RNA
tttcccaggtcttccacatccttca

SEQ ID NO: 7414 - RNA, 25 nt, Homo sapiens
  source 1..25: mol_type = unassigned RNA
ctttcccaggtcttccacatccttc

SEQ ID NO: 7415 - RNA, 25 nt, Homo sapiens
  source 1..25: mol_type = unassigned RNA
cctctgagtctgcacaagctttccc

SEQ ID NO: 7416 - RNA, 25 nt, Homo sapiens
  source 1..25: mol_type = unassigned RNA
gttctctccaggacgagaagttcct

SEQ ID NO: 7417 - RNA, 25 nt, Homo sapiens
  source 1..25: mol_type = unassigned RNA
cgagaagttcctcggaagacacagc

SEQ ID NO: 7418 - RNA, 25 nt, Homo sapiens
  source 1..25: mol_type = unassigned RNA
gagaagttcctcggaagacacagct

SEQ ID NO: 7419 - RNA, 25 nt, Homo sapiens
  source 1..25: mol_type = unassigned RNA
agaagttcctcggaagacacagctg

SEQ ID NO: 7420 - RNA, 25 nt, Homo sapiens
  source 1..25: mol_type = unassigned RNA
cacagctggggagctccctgctgtt

SEQ ID NO: 7421 - RNA, 25 nt, Homo sapiens
  source 1..25: mol_type = unassigned RNA
acagctggggagctccctgctgttc

SEQ ID NO: 7422 - RNA, 25 nt, Homo sapiens
  source 1..25: mol_type = unassigned RNA
cctgctgttcgggacctaaagaaac

SEQ ID NO: 7423 - RNA, 25 nt, Homo sapiens
  source 1..25: mol_type = unassigned RNA
aagaaactggagtttgcgtaagcaa

SEQ ID NO: 7424 - RNA, 25 nt, Homo sapiens
  source 1..25: mol_type = unassigned RNA
agaaactggagtttgcgtaagcaaa

SEQ ID NO: 7425 - RNA, 25 nt, Homo sapiens
  source 1..25: mol_type = unassigned RNA
gaaactggagtttgcgtaagcaaag

SEQ ID NO: 7426 - RNA, 25 nt, Homo sapiens
  source 1..25: mol_type = unassigned RNA
actggagtttgcgtaagcaaagggg

SEQ ID NO: 7427 - RNA, 25 nt, Homo sapiens
  source 1..25: mol_type = unassigned RNA
aggaacttctcgtcctggagagaac

SEQ ID NO: 7428 - RNA, 25 nt, Homo sapiens
  source 1..25: mol_type = unassigned RNA
gtgtcttccgaggaacttctcgtcc

SEQ ID NO: 7429 - RNA, 25 nt, Homo sapiens
  source 1..25: mol_type = unassigned RNA
gggagctccccagctgtgtcttccg

SEQ ID NO: 7430 - RNA, 25 nt, Homo sapiens
  source 1..25: mol_type = unassigned RNA
cagtttctttaggtcccgaacagca

SEQ ID NO: 7431 - RNA, 25 nt, Homo sapiens
  source 1..25: mol_type = unassigned RNA
ccagtttctttaggtcccgaacagc

SEQ ID NO: 7432 - RNA, 25 nt, Homo sapiens
  source 1..25: mol_type = unassigned RNA
tgcttacgcaaactccagtttcttt

SEQ ID NO: 7433 - RNA, 25 nt, Homo sapiens
  source 1..25: mol_type = unassigned RNA
tgcctcctaggctgggccctgtctc

SEQ ID NO: 7434 - RNA, 25 nt, Homo sapiens
  source 1..25: mol_type = unassigned RNA
aggctgggccctgtctcaggccccc

SEQ ID NO: 7435 - RNA, 25 nt, Homo sapiens
  source 1..25: mol_type = unassigned RNA
tcaggcccccaggctttccccaaac

SEQ ID NO: 7436 - RNA, 25 nt, Homo sapiens
  source 1..25: mol_type = unassigned RNA
cccccaggctttccccaaactggtg

SEQ ID NO: 7437 - RNA, 25 nt, Homo sapiens
  source 1..25: mol_type = unassigned RNA
ttccccaaactggtgcggatcctca

SEQ ID NO: 7438 - RNA, 25 nt, Homo sapiens
  source 1..25: mol_type = unassigned RNA
acggccttttcctccctgcagcatc

SEQ ID NO: 7439 - RNA, 25 nt, Homo sapiens
  source 1..25: mol_type = unassigned RNA
cagcatctggagtgagtatagactc

SEQ ID NO: 7440 - RNA, 25 nt, Homo sapiens
  source 1..25: mol_type = unassigned RNA
agcatctggagtgagtatagactct

SEQ ID NO: 7441 - RNA, 25 nt, Homo sapiens
  source 1..25: mol_type = unassigned RNA
ggcccagcctaggaggcaaagagca

SEQ ID NO: 7442 - RNA, 25 nt, Homo sapiens
  source 1..25: mol_type = unassigned RNA
ggcctgagacagggcccagcctagg

SEQ ID NO: 7443 - RNA, 25 nt, Homo sapiens
  source 1..25: mol_type = unassigned RNA
gggggcctgagacagggcccagcct

SEQ ID NO: 7444 - RNA, 25 nt, Homo sapiens
  source 1..25: mol_type = unassigned RNA
ggggaaagcctgggggcctgagaca

SEQ ID NO: 7445 - RNA, 25 nt, Homo sapiens
  source 1..25: mol_type = unassigned RNA
tggggaaagcctgggggcctgagac

SEQ ID NO: 7446 - RNA, 25 nt, Homo sapiens
  source 1..25: mol_type = unassigned RNA
ccgcaccagtttggggaaagcctgg

SEQ ID NO: 7447 - RNA, 25 nt, Homo sapiens
  source 1..25: mol_type = unassigned RNA
tccgcaccagtttggggaaagcctg

SEQ ID NO: 7448 - RNA, 25 nt, Homo sapiens
  source 1..25: mol_type = unassigned RNA
atccgcaccagtttggggaaagcct

SEQ ID NO: 7449 - RNA, 25 nt, Homo sapiens
  source 1..25: mol_type = unassigned RNA
gatccgcaccagtttggggaaagcc

SEQ ID NO: 7450 - RNA, 25 nt, Homo sapiens
  source 1..25: mol_type = unassigned RNA
ggccgtgaggatccgcaccagtttg

SEQ ID NO: 7451 - RNA, 25 nt, Homo sapiens
  source 1..25: mol_type = unassigned RNA
aggccgtgaggatccgcaccagttt

SEQ ID NO: 7452 - RNA, 25 nt, Homo sapiens
  source 1..25: mol_type = unassigned RNA
aaggccgtgaggatccgcaccagtt

SEQ ID NO: 7453 - RNA, 25 nt, Homo sapiens
  source 1..25: mol_type = unassigned RNA
atgctgcagggaggaaaaggccgtg

SEQ ID NO: 7454 - RNA, 25 nt, Homo sapiens
  source 1..25: mol_type = unassigned RNA
cactccagatgctgcagggaggaaa

SEQ ID NO: 7455 - RNA, 25 nt, Homo sapiens
  source 1..25: mol_type = unassigned RNA
tatactcactccagatgctgcaggg

SEQ ID NO: 7456 - RNA, 25 nt, Homo sapiens
  source 1..25: mol_type = unassigned RNA
gtctatactcactccagatgctgca

SEQ ID NO: 7457 - RNA, 25 nt, Homo sapiens
  source 1..25: mol_type = unassigned RNA
agtctatactcactccagatgctgc

SEQ ID NO: 7458 - RNA, 25 nt, Homo sapiens
  source 1..25: mol_type = unassigned RNA
tggatgcgctgagtgagaacaagat

SEQ ID NO: 7459 - RNA, 25 nt, Homo sapiens
  source 1..25: mol_type = unassigned RNA
ggatgcgctgagtgagaacaagatc

SEQ ID NO: 7460 - RNA, 25 nt, Homo sapiens
  source 1..25: mol_type = unassigned RNA
gatgcgctgagtgagaacaagatcg

SEQ ID NO: 7461 - RNA, 25 nt, Homo sapiens
  source 1..25: mol_type = unassigned RNA
ctgagtgagaacaagatcggggacg

SEQ ID NO: 7462 - RNA, 25 nt, Homo sapiens
  source 1..25: mol_type = unassigned RNA
tgagtgagaacaagatcggggacga

SEQ ID NO: 7463 - RNA, 25 nt, Homo sapiens
  source 1..25: mol_type = unassigned RNA
gccaccttcccccagctgaagtcct

SEQ ID NO: 7464 - RNA, 25 nt, Homo sapiens
  source 1..25: mol_type = unassigned RNA
cttggaaaccctcaagtgagtgagc

SEQ ID NO: 7465 - RNA, 25 nt, Homo sapiens
  source 1..25: mol_type = unassigned RNA
ttggaaaccctcaagtgagtgagct

SEQ ID NO: 7466 - RNA, 25 nt, Homo sapiens
  source 1..25: mol_type = unassigned RNA
catccaggctgcaggtggaatcaga

SEQ ID NO: 7467 - RNA, 25 nt, Homo sapiens
  source 1..25: mol_type = unassigned RNA
tcactcagcgcatccaggctgcagg

SEQ ID NO: 7468 - RNA, 25 nt, Homo sapiens
  source 1..25: mol_type = unassigned RNA
ttctcactcagcgcatccaggctgc

SEQ ID NO: 7469 - RNA, 25 nt, Homo sapiens
  source 1..25: mol_type = unassigned RNA
gatcttgttctcactcagcgcatcc

SEQ ID NO: 7470 - RNA, 25 nt, Homo sapiens
  source 1..25: mol_type = unassigned RNA
tccaaggacttcagctgggggaagg

SEQ ID NO: 7471 - RNA, 25 nt, Homo sapiens
  source 1..25: mol_type = unassigned RNA
gtttccaaggacttcagctggggga

SEQ ID NO: 7472 - RNA, 25 nt, Homo sapiens
  source 1..25: mol_type = unassigned RNA
gagggtttccaaggacttcagctgg

SEQ ID NO: 7473 - RNA, 25 nt, Homo sapiens
  source 1..25: mol_type = unassigned RNA
tgagggtttccaaggacttcagctg

SEQ ID NO: 7474 - RNA, 25 nt, Homo sapiens
  source 1..25: mol_type = unassigned RNA
ttgagggtttccaaggacttcagct

SEQ ID NO: 7475 - RNA, 25 nt, Homo sapiens
  source 1..25: mol_type = unassigned RNA
cttgagggtttccaaggacttcagc

SEQ ID NO: 7476 - RNA, 25 nt, Homo sapiens
  source 1..25: mol_type = unassigned RNA
cagctcactcacttgagggtttcca

SEQ ID NO: 7477 - RNA, 25 nt, Homo sapiens
  source 1..25: mol_type = unassigned RNA
ctgtcccagaacaacatcactgacc

SEQ ID NO: 7478 - RNA, 25 nt, Homo sapiens
  source 1..25: mol_type = unassigned RNA
tgtcccagaacaacatcactgacct

SEQ ID NO: 7479 - RNA, 25 nt, Homo sapiens
  source 1..25: mol_type = unassigned RNA
gacctgggtgcctacaaactcgccg

SEQ ID NO: 7480 - RNA, 25 nt, Homo sapiens
  source 1..25: mol_type = unassigned RNA
gccttcgctcgctgcatccctgctc

SEQ ID NO: 7481 - RNA, 25 nt, Homo sapiens
  source 1..25: mol_type = unassigned RNA
gctcgctgcatccctgctcaggcta

SEQ ID NO: 7482 - RNA, 25 nt, Homo sapiens
  source 1..25: mol_type = unassigned RNA
gcatccctgctcaggctaaggtgag

SEQ ID NO: 7483 - RNA, 25 nt, Homo sapiens
  source 1..25: mol_type = unassigned RNA
catccctgctcaggctaaggtgagt

SEQ ID NO: 7484 - RNA, 25 nt, Homo sapiens
  source 1..25: mol_type = unassigned RNA
atccctgctcaggctaaggtgagtg

SEQ ID NO: 7485 - RNA, 25 nt, Homo sapiens
  source 1..25: mol_type = unassigned RNA
gctcaggctaaggtgagtggggccc

SEQ ID NO: 7486 - RNA, 25 nt, Homo sapiens
  source 1..25: mol_type = unassigned RNA
gggacagactgcggggacacagtga

SEQ ID NO: 7487 - RNA, 25 nt, Homo sapiens
  source 1..25: mol_type = unassigned RNA
tgggacagactgcggggacacagtg

SEQ ID NO: 7488 - RNA, 25 nt, Homo sapiens
  source 1..25: mol_type = unassigned RNA
tgatgttgttctgggacagactgcg

SEQ ID NO: 7489 - RNA, 25 nt, Homo sapiens
  source 1..25: mol_type = unassigned RNA
gtgatgttgttctgggacagactgc

SEQ ID NO: 7490 - RNA, 25 nt, Homo sapiens
  source 1..25: mol_type = unassigned RNA
agtgatgttgttctgggacagactg

SEQ ID NO: 7491 - RNA, 25 nt, Homo sapiens
  source 1..25: mol_type = unassigned RNA
gcacccaggtcagtgatgttgttct

SEQ ID NO: 7492 - RNA, 25 nt, Homo sapiens
  source 1..25: mol_type = unassigned RNA
ggcacccaggtcagtgatgttgttc

SEQ ID NO: 7493 - RNA, 25 nt, Homo sapiens
  source 1..25: mol_type = unassigned RNA
ggcctcggcgagtttgtaggcaccc

SEQ ID NO: 7494 - RNA, 25 nt, Homo sapiens
  source 1..25: mol_type = unassigned RNA
gaaggcagggcctcggcgagtttgt

SEQ ID NO: 7495 - RNA, 25 nt, Homo sapiens
  source 1..25: mol_type = unassigned RNA
gatgcagcgagcgaaggcagggcct

SEQ ID NO: 7496 - RNA, 25 nt, Homo sapiens
  source 1..25: mol_type = unassigned RNA
agcagggatgcagcgagcgaaggca

SEQ ID NO: 7497 - RNA, 25 nt, Homo sapiens
  source 1..25: mol_type = unassigned RNA
gagcagggatgcagcgagcgaaggc

SEQ ID NO: 7498 - RNA, 25 nt, Homo sapiens
  source 1..25: mol_type = unassigned RNA
gcctgagcagggatgcagcgagcga

SEQ ID NO: 7499 - RNA, 25 nt, Homo sapiens
  source 1..25: mol_type = unassigned RNA
ggccccactcaccttagcctgagca

SEQ ID NO: 7500 - RNA, 25 nt, Homo sapiens
  source 1..25: mol_type = unassigned RNA
gggccccactcaccttagcctgagc

SEQ ID NO: 7501 - RNA, 25 nt, Homo sapiens
  source 1..25: mol_type = unassigned RNA
ttgtacaataactgcatctgcgacg

SEQ ID NO: 7502 - RNA, 25 nt, Homo sapiens
  source 1..25: mol_type = unassigned RNA
tgtacaataactgcatctgcgacgt

SEQ ID NO: 7503 - RNA, 25 nt, Homo sapiens
  source 1..25: mol_type = unassigned RNA
atctgcgacgtgggagccgagagct

SEQ ID NO: 7504 - RNA, 25 nt, Homo sapiens
  source 1..25: mol_type = unassigned RNA
gccgagagcttggctcgtgtgcttc

SEQ ID NO: 7505 - RNA, 25 nt, Homo sapiens
  source 1..25: mol_type = unassigned RNA
agcttggctcgtgtgcttccggaca

SEQ ID NO: 7506 - RNA, 25 nt, Homo sapiens
  source 1..25: mol_type = unassigned RNA
tgtgcttccggacatggtgtccctc

SEQ ID NO: 7507 - RNA, 25 nt, Homo sapiens
  source 1..25: mol_type = unassigned RNA
gtgcttccggacatggtgtccctcc

SEQ ID NO: 7508 - RNA, 25 nt, Homo sapiens
  source 1..25: mol_type = unassigned RNA
ccggacatggtgtccctccgggtga

SEQ ID NO: 7509 - RNA, 25 nt, Homo sapiens
  source 1..25: mol_type = unassigned RNA
gtccctccgggtgatggagtgagtg

SEQ ID NO: 7510 - RNA, 25 nt, Homo sapiens
  source 1..25: mol_type = unassigned RNA
tccctccgggtgatggagtgagtgt

SEQ ID NO: 7511 - RNA, 25 nt, Homo sapiens
  source 1..25: mol_type = unassigned RNA
gggtgatggagtgagtgtgggagtc

SEQ ID NO: 7512 - RNA, 25 nt, Homo sapiens
  source 1..25: mol_type = unassigned RNA
ggtgatggagtgagtgtgggagtct

SEQ ID NO: 7513 - RNA, 25 nt, Homo sapiens
  source 1..25: mol_type = unassigned RNA
ttattgtacaagctgtcggaaacag

SEQ ID NO: 7514 - RNA, 25 nt, Homo sapiens
  source 1..25: mol_type = unassigned RNA
cagatgcagttattgtacaagctgt

SEQ ID NO: 7515 - RNA, 25 nt, Homo sapiens
  source 1..25: mol_type = unassigned RNA
tccggaagcacacgagccaagctct

SEQ ID NO: 7516 - RNA, 25 nt, Homo sapiens
  source 1..25: mol_type = unassigned RNA
ccatcacccggagggacaccatgtc

SEQ ID NO: 7517 - RNA, 25 nt, Homo sapiens
  source 1..25: mol_type = unassigned RNA
tcccacactcactccatcacccgga

SEQ ID NO: 7518 - RNA, 25 nt, Homo sapiens
  source 1..25: mol_type = unassigned RNA
ctcccacactcactccatcacccgg

SEQ ID NO: 7519 - RNA, 25 nt, Homo sapiens
  source 1..25: mol_type = unassigned RNA
agactcccacactcactccatcacc

SEQ ID NO: 7520 - RNA, 25 nt, Homo sapiens
  source 1..25: mol_type = unassigned RNA
gccagcgtccagtacaacaagttca

SEQ ID NO: 7521 - RNA, 25 nt, Homo sapiens
  source 1..25: mol_type = unassigned RNA
tccagtacaacaagttcacggctgc

SEQ ID NO: 7522 - RNA, 25 nt, Homo sapiens
  source 1..25: mol_type = unassigned RNA
ccagtacaacaagttcacggctgcc

SEQ ID NO: 7523 - RNA, 25 nt, Homo sapiens
  source 1..25: mol_type = unassigned RNA
cagtacaacaagttcacggctgccg

SEQ ID NO: 7524 - RNA, 25 nt, Homo sapiens
  source 1..25: mol_type = unassigned RNA
ggcccagcagctcgctgccagcctt

SEQ ID NO: 7525 - RNA, 25 nt, Homo sapiens
  source 1..25: mol_type = unassigned RNA
ccagcagctcgctgccagccttcgg

SEQ ID NO: 7526 - RNA, 25 nt, Homo sapiens
  source 1..25: mol_type = unassigned RNA
gccagccttcggaggtgtcctcatg

SEQ ID NO: 7527 - RNA, 25 nt, Homo sapiens
  source 1..25: mol_type = unassigned RNA
cggaggtgtcctcatgtggagacgc

SEQ ID NO: 7528 - RNA, 25 nt, Homo sapiens
  source 1..25: mol_type = unassigned RNA
catgtggagacgctggcgtaagtcc

SEQ ID NO: 7529 - RNA, 25 nt, Homo sapiens
  source 1..25: mol_type = unassigned RNA
acgctggcgtaagtccaggcaaccc

SEQ ID NO: 7530 - RNA, 25 nt, Homo sapiens
  source 1..25: mol_type = unassigned RNA
gccgtgaacttgttgtactggacgc

SEQ ID NO: 7531 - RNA, 25 nt, Homo sapiens
  source 1..25: mol_type = unassigned RNA
cccggcagccgtgaacttgttgtac

SEQ ID NO: 7532 - RNA, 25 nt, Homo sapiens
  source 1..25: mol_type = unassigned RNA
aggctggcagcgagctgctgggccc

SEQ ID NO: 7533 - RNA, 25 nt, Homo sapiens
  source 1..25: mol_type = unassigned RNA
ctccgaaggctggcagcgagctgct

SEQ ID NO: 7534 - RNA, 25 nt, Homo sapiens
  source 1..25: mol_type = unassigned RNA
cctccgaaggctggcagcgagctgc

SEQ ID NO: 7535 - RNA, 25 nt, Homo sapiens
  source 1..25: mol_type = unassigned RNA
tccacatgaggacacctccgaaggc

SEQ ID NO: 7536 - RNA, 25 nt, Homo sapiens
  source 1..25: mol_type = unassigned RNA
cgtctccacatgaggacacctccga

SEQ ID NO: 7537 - RNA, 25 nt, Homo sapiens
  source 1..25: mol_type = unassigned RNA
ggacttacgccagcgtctccacatg

SEQ ID NO: 7538 - RNA, 25 nt, Homo sapiens
  source 1..25: mol_type = unassigned RNA
acgcccaccatcccattcagtgtcc

SEQ ID NO: 7539 - RNA, 25 nt, Homo sapiens
  source 1..25: mol_type = unassigned RNA
agtgtccaggaacacctgcaacaac

SEQ ID NO: 7540 - RNA, 25 nt, Homo sapiens
  source 1..25: mol_type = unassigned RNA
ggaacacctgcaacaacaggattca

SEQ ID NO: 7541 - RNA, 25 nt, Homo sapiens
  source 1..25: mol_type = unassigned RNA
gcctgagatgatcccagctgtgctc

SEQ ID NO: 7542 - RNA, 25 nt, Homo sapiens
  source 1..25: mol_type = unassigned RNA
agatgatcccagctgtgctctggac

SEQ ID NO: 7543 - RNA, 25 nt, Homo sapiens
  source 1..25: mol_type = unassigned RNA
gatgatcccagctgtgctctggaca

SEQ ID NO: 7544 - RNA, 25 nt, Homo sapiens
  source 1..25: mol_type = unassigned RNA
cagctgtgctctggacagggtaacc

SEQ ID NO: 7545 - RNA, 25 nt, Homo sapiens
  source 1..25: mol_type = unassigned RNA
agctgtgctctggacagggtaacca

SEQ ID NO: 7546 - RNA, 25 nt, Homo sapiens
  source 1..25: mol_type = unassigned RNA
tgtgctctggacagggtaaccaggg

SEQ ID NO: 7547 - RNA, 25 nt, Homo sapiens
  source 1..25: mol_type = unassigned RNA
gtgctctggacagggtaaccagggt

SEQ ID NO: 7548 - RNA, 25 nt, Homo sapiens
  source 1..25: mol_type = unassigned RNA
ctggacagggtaaccagggtgggct

SEQ ID NO: 7549 - RNA, 25 nt, Homo sapiens
  source 1..25: mol_type = unassigned RNA
tggacagggtaaccagggtgggctt

SEQ ID NO: 7550 - RNA, 25 nt, Homo sapiens
  source 1..25: mol_type = unassigned RNA
gcgtccacatcctgcaaggggggat

SEQ ID NO: 7551 - RNA, 25 nt, Homo sapiens
  source 1..25: mol_type = unassigned RNA
ggcgtccacatcctgcaagggggga

SEQ ID NO: 7552 - RNA, 25 nt, Homo sapiens
  source 1..25: mol_type = unassigned RNA
ggtgggcgtccacatcctgcaaggg

SEQ ID NO: 7553 - RNA, 25 nt, Homo sapiens
  source 1..25: mol_type = unassigned RNA
tggtgggcgtccacatcctgcaagg

SEQ ID NO: 7554 - RNA, 25 nt, Homo sapiens
  source 1..25: mol_type = unassigned RNA
atggtgggcgtccacatcctgcaag

SEQ ID NO: 7555 - RNA, 25 nt, Homo sapiens
  source 1..25: mol_type = unassigned RNA
gatggtgggcgtccacatcctgcaa

SEQ ID NO: 7556 - RNA, 25 nt, Homo sapiens
  source 1..25: mol_type = unassigned RNA
ggatggtgggcgtccacatcctgca

SEQ ID NO: 7557 - RNA, 25 nt, Homo sapiens
  source 1..25: mol_type = unassigned RNA
gttcctggacactgaatgggatggt

SEQ ID NO: 7558 - RNA, 25 nt, Homo sapiens
  source 1..25: mol_type = unassigned RNA
tgttcctggacactgaatgggatgg

SEQ ID NO: 7559 - RNA, 25 nt, Homo sapiens
  source 1..25: mol_type = unassigned RNA
aggtgttcctggacactgaatggga

SEQ ID NO: 7560 - RNA, 25 nt, Homo sapiens
  source 1..25: mol_type = unassigned RNA
ttgcaggtgttcctggacactgaat

SEQ ID NO: 7561 - RNA, 25 nt, Homo sapiens
  source 1..25: mol_type = unassigned RNA
gttgcaggtgttcctggacactgaa

SEQ ID NO: 7562 - RNA, 25 nt, Homo sapiens
  source 1..25: mol_type = unassigned RNA
tgaatcctgttgttgcaggtgttcc

SEQ ID NO: 7563 - RNA, 25 nt, Homo sapiens
  source 1..25: mol_type = unassigned RNA
gctgatccgtgaatcctgttgttgc

SEQ ID NO: 7564 - RNA, 25 nt, Homo sapiens
  source 1..25: mol_type = unassigned RNA
tccagagcacagctgggatcatctc

SEQ ID NO: 7565 - RNA, 25 nt, Homo sapiens
  source 1..25: mol_type = unassigned RNA
tggttaccctgtccagagcacagct

SEQ ID NO: 7566 - RNA, 25 nt, Homo sapiens
  source 1..25: mol_type = unassigned RNA
ctggttaccctgtccagagcacagc

SEQ ID NO: 7567 - RNA, 25 nt, Homo sapiens
  source 1..25: mol_type = unassigned RNA
tcctcccgctacagcatgttctctg

SEQ ID NO: 7568 - RNA, 25 nt, Homo sapiens
  source 1..25: mol_type = unassigned RNA
tgttctctgaggacactaaccacgc

SEQ ID NO: 7569 - RNA, 25 nt, Homo sapiens
  source 1..25: mol_type = unassigned RNA
acactaaccacgctggaccttgaac

SEQ ID NO: 7570 - RNA, 25 nt, Homo sapiens
  source 1..25: mol_type = unassigned RNA
cactaaccacgctggaccttgaact

SEQ ID NO: 7571 - RNA, 25 nt, Homo sapiens
  source 1..25: mol_type = unassigned RNA
cgctggaccttgaactgggtacttg

SEQ ID NO: 7572 - RNA, 25 nt, Homo sapiens
  source 1..25: mol_type = unassigned RNA
gtacttgtggacacagctcttctcc

SEQ ID NO: 7573 - RNA, 25 nt, Homo sapiens
  source 1..25: mol_type = unassigned RNA
ctgtatcccatgagcctcagcatcc

SEQ ID NO: 7574 - RNA, 25 nt, Homo sapiens
  source 1..25: mol_type = unassigned RNA
ccatgagcctcagcatcctggcacc

SEQ ID NO: 7575 - RNA, 25 nt, Homo sapiens
  source 1..25: mol_type = unassigned RNA
cagcatcctggcacccggcccctgc

SEQ ID NO: 7576 - RNA, 25 nt, Homo sapiens
  source 1..25: mol_type = unassigned RNA
cctggcacccggcccctgctggttc

SEQ ID NO: 7577 - RNA, 25 nt, Homo sapiens
  source 1..25: mol_type = unassigned RNA
ctggcacccggcccctgctggttca

SEQ ID NO: 7578 - RNA, 25 nt, Homo sapiens
  source 1..25: mol_type = unassigned RNA
cacccggcccctgctggttcagggt

SEQ ID NO: 7579 - RNA, 25 nt, Homo sapiens
  source 1..25: mol_type = unassigned RNA
tgctggttcagggttggcccctgcc

SEQ ID NO: 7580 - RNA, 25 nt, Homo sapiens
  source 1..25: mol_type = unassigned RNA
ttcagggttggcccctgcccggctg

SEQ ID NO: 7581 - RNA, 25 nt, Homo sapiens
  source 1..25: mol_type = unassigned RNA
cacatcttgctctgctgacagacac

SEQ ID NO: 7582 - RNA, 25 nt, Homo sapiens
  source 1..25: mol_type = unassigned RNA
cttgctctgctgacagacacaggcc

SEQ ID NO: 7583 - RNA, 25 nt, Homo sapiens
  source 1..25: mol_type = unassigned RNA
tgctgacagacacaggcccggctcc

SEQ ID NO: 7584 - RNA, 25 nt, Homo sapiens
  source 1..25: mol_type = unassigned RNA
gctccaggctcctttagcgcccagt

SEQ ID NO: 7585 - RNA, 25 nt, Homo sapiens
  source 1..25: mol_type = unassigned RNA
ctccaggctcctttagcgcccagtt

SEQ ID NO: 7586 - RNA, 25 nt, Homo sapiens
  source 1..25: mol_type = unassigned RNA
caggctcctttagcgcccagttggg

SEQ ID NO: 7587 - RNA, 25 nt, Homo sapiens
  source 1..25: mol_type = unassigned RNA
tttagcgcccagttgggtggatgcc

SEQ ID NO: 7588 - RNA, 25 nt, Homo sapiens
  source 1..25: mol_type = unassigned RNA
agcgcccagttgggtggatgcctgg

SEQ ID NO: 7589 - RNA, 25 nt, Homo sapiens
  source 1..25: mol_type = unassigned RNA
ttgggtggatgcctggtggcagctg

SEQ ID NO: 7590 - RNA, 25 nt, Homo sapiens
  source 1..25: mol_type = unassigned RNA
gcctggtggcagctgcggtccaccc

SEQ ID NO: 7591 - RNA, 25 nt, Homo sapiens
  source 1..25: mol_type = unassigned RNA
agctgcggtccacccaggagccccg

SEQ ID NO: 7592 - RNA, 25 nt, Homo sapiens
  source 1..25: mol_type = unassigned RNA
ccaggagccccgaggccttctctga

SEQ ID NO: 7593 - RNA, 25 nt, Homo sapiens
  source 1..25: mol_type = unassigned RNA
ccgaggccttctctgaaggacattg

SEQ ID NO: 7594 - RNA, 25 nt, Homo sapiens
  source 1..25: mol_type = unassigned RNA
ctctgaaggacattgcggacagcca

SEQ ID NO: 7595 - RNA, 25 nt, Homo sapiens
  source 1..25: mol_type = unassigned RNA
aaggacattgcggacagccacggcc

SEQ ID NO: 7596 - RNA, 25 nt, Homo sapiens
  source 1..25: mol_type = unassigned RNA
ttgcggacagccacggccaggccag

SEQ ID NO: 7597 - RNA, 25 nt, Homo sapiens
  source 1..25: mol_type = unassigned RNA
tgcggacagccacggccaggccaga

SEQ ID NO: 7598 - RNA, 25 nt, Homo sapiens
  source 1..25: mol_type = unassigned RNA
acggccaggccagagggagtgacag

SEQ ID NO: 7599 - RNA, 25 nt, Homo sapiens
  source 1..25: mol_type = unassigned RNA
agaggcagccccattctgcctgccc

SEQ ID NO: 7600 - RNA, 25 nt, Homo sapiens
  source 1..25: mol_type = unassigned RNA
ctgcctgcccaggcccctgccaccc

SEQ ID NO: 7601 - RNA, 25 nt, Homo sapiens
  source 1..25: mol_type = unassigned RNA
tgcctgcccaggcccctgccaccct

SEQ ID NO: 7602 - RNA, 25 nt, Homo sapiens
  source 1..25: mol_type = unassigned RNA
gcctgcccaggcccctgccaccctg

SEQ ID NO: 7603 - RNA, 25 nt, Homo sapiens
  source 1..25: mol_type = unassigned RNA
ctgctctccgaccagacaccttgac

SEQ ID NO: 7604 - RNA, 25 nt, Homo sapiens
  source 1..25: mol_type = unassigned RNA
tgctctccgaccagacaccttgaca

SEQ ID NO: 7605 - RNA, 25 nt, Homo sapiens
  source 1..25: mol_type = unassigned RNA
gaccagacaccttgacagggcacac

SEQ ID NO: 7606 - RNA, 25 nt, Homo sapiens
  source 1..25: mol_type = unassigned RNA
accagacaccttgacagggcacacc

SEQ ID NO: 7607 - RNA, 25 nt, Homo sapiens
  source 1..25: mol_type = unassigned RNA
acaccgggcactcagaagacactga

SEQ ID NO: 7608 - RNA, 25 nt, Homo sapiens
  source 1..25: mol_type = unassigned RNA
caccgggcactcagaagacactgat

SEQ ID NO: 7609 - RNA, 25 nt, Homo sapiens
  source 1..25: mol_type = unassigned RNA
gcctgctaattccccagattgcaac

SEQ ID NO: 7610 - RNA, 25 nt, Homo sapiens
  source 1..25: mol_type = unassigned RNA
gctaattccccagattgcaacaggc

SEQ ID NO: 7611 - RNA, 25 nt, Homo sapiens
  source 1..25: mol_type = unassigned RNA
ctaattccccagattgcaacaggct

SEQ ID NO: 7612 - RNA, 25 nt, Homo sapiens
  source 1..25: mol_type = unassigned RNA
cagattgcaacaggctgggcttcag

SEQ ID NO: 7613 - RNA, 25 nt, Homo sapiens
  source 1..25: mol_type = unassigned RNA
cttcagtggcagctgcttttgtcta

SEQ ID NO: 7614 - RNA, 25 nt, Homo sapiens
  source 1..25: mol_type = unassigned RNA
ttcagtggcagctgcttttgtctat

SEQ ID NO: 7615 - RNA, 25 nt, Homo sapiens
  source 1..25: mol_type = unassigned RNA
atgggactcaatgcactgacattgt

SEQ ID NO: 7616 - RNA, 25 nt, Homo sapiens
  source 1..25: mol_type = unassigned RNA
gacattgttggccaaagccaaagct

SEQ ID NO: 7617 - RNA, 25 nt, Homo sapiens
  source 1..25: mol_type = unassigned RNA
tgttggccaaagccaaagctaggcc

SEQ ID NO: 7618 - RNA, 25 nt, Homo sapiens
  source 1..25: mol_type = unassigned RNA
ctggccagatgcaccagcccttagc

SEQ ID NO: 7619 - RNA, 25 nt, Homo sapiens
  source 1..25: mol_type = unassigned RNA
tggccagatgcaccagcccttagca

SEQ ID NO: 7620 - RNA, 25 nt, Homo sapiens
  source 1..25: mol_type = unassigned RNA
cagcccttagcagggaaacagctaa

SEQ ID NO: 7621 - RNA, 25 nt, Homo sapiens
  source 1..25: mol_type = unassigned RNA
agcccttagcagggaaacagctaat

SEQ ID NO: 7622 - RNA, 25 nt, Homo sapiens
  source 1..25: mol_type = unassigned RNA
agggaaacagctaatgggacactaa

SEQ ID NO: 7623 - RNA, 25 nt, Homo sapiens
  source 1..25: mol_type = unassigned RNA
gggaaacagctaatgggacactaat

SEQ ID NO: 7624 - RNA, 25 nt, Homo sapiens
  source 1..25: mol_type = unassigned RNA
ggaaacagctaatgggacactaatg

SEQ ID NO: 7625 - RNA, 25 nt, Homo sapiens
  source 1..25: mol_type = unassigned RNA
aacagctaatgggacactaatgggg

SEQ ID NO: 7626 - RNA, 25 nt, Homo sapiens
  source 1..25: mol_type = unassigned RNA
aatgggacactaatggggcggtgag

SEQ ID NO: 7627 - RNA, 25 nt, Homo sapiens
  source 1..25: mol_type = unassigned RNA
atgggacactaatggggcggtgaga

SEQ ID NO: 7628 - RNA, 25 nt, Homo sapiens
  source 1..25: mol_type = unassigned RNA
tgggacactaatggggcggtgagag

SEQ ID NO: 7629 - RNA, 25 nt, Homo sapiens
  source 1..25: mol_type = unassigned RNA
atggggcggtgagaggggaacagac

SEQ ID NO: 7630 - RNA, 25 nt, Homo sapiens
  source 1..25: mol_type = unassigned RNA
attataaatgtctctttaatgtcac

SEQ ID NO: 7631 - RNA, 25 nt, Homo sapiens
  source 1..25: mol_type = unassigned RNA
taaatgtctctttaatgtcacaggc

SEQ ID NO: 7632 - RNA, 25 nt, Homo sapiens
  source 1..25: mol_type = unassigned RNA
tctctttaatgtcacaggcaggtcc

SEQ ID NO: 7633 - RNA, 25 nt, Homo sapiens
  source 1..25: mol_type = unassigned RNA
ctctttaatgtcacaggcaggtcca

SEQ ID NO: 7634 - RNA, 25 nt, Homo sapiens
  source 1..25: mol_type = unassigned RNA
ttgagttcataccctgttaccattt

SEQ ID NO: 7635 - RNA, 25 nt, Homo sapiens
  source 1..25: mol_type = unassigned RNA
tgagttcataccctgttaccatttt

SEQ ID NO: 7636 - RNA, 25 nt, Homo sapiens
  source 1..25: mol_type = unassigned RNA
gagttcataccctgttaccattttg

SEQ ID NO: 7637 - RNA, 25 nt, Homo sapiens
  source 1..25: mol_type = unassigned RNA
agaacatgctgtagcgggaggagcc

SEQ ID NO: 7638 - RNA, 25 nt, Homo sapiens
  source 1..25: mol_type = unassigned RNA
tcctcagagaacatgctgtagcggg

SEQ ID NO: 7639 - RNA, 25 nt, Homo sapiens
  source 1..25: mol_type = unassigned RNA
gtgtcctcagagaacatgctgtagc

SEQ ID NO: 7640 - RNA, 25 nt, Homo sapiens
  source 1..25: mol_type = unassigned RNA
agtgtcctcagagaacatgctgtag

SEQ ID NO: 7641 - RNA, 25 nt, Homo sapiens
  source 1..25: mol_type = unassigned RNA
caagtacccagttcaaggtccagcg

SEQ ID NO: 7642 - RNA, 25 nt, Homo sapiens
  source 1..25: mol_type = unassigned RNA
gctgtgtccacaagtacccagttca

SEQ ID NO: 7643 - RNA, 25 nt, Homo sapiens
  source 1..25: mol_type = unassigned RNA
atgctgaggctcatgggatacagcc

SEQ ID NO: 7644 - RNA, 25 nt, Homo sapiens
  source 1..25: mol_type = unassigned RNA
cgggtgccaggatgctgaggctcat

SEQ ID NO: 7645 - RNA, 25 nt, Homo sapiens
  source 1..25: mol_type = unassigned RNA
ccgggtgccaggatgctgaggctca

SEQ ID NO: 7646 - RNA, 25 nt, Homo sapiens
  source 1..25: mol_type = unassigned RNA
gcaggggccgggtgccaggatgctg

SEQ ID NO: 7647 - RNA, 25 nt, Homo sapiens
  source 1..25: mol_type = unassigned RNA
cctgaaccagcaggggccgggtgcc

SEQ ID NO: 7648 - RNA, 25 nt, Homo sapiens
  source 1..25: mol_type = unassigned RNA
ggccaaccctgaaccagcaggggcc

SEQ ID NO: 7649 - RNA, 25 nt, Homo sapiens
  source 1..25: mol_type = unassigned RNA
gggccaaccctgaaccagcaggggc

SEQ ID NO: 7650 - RNA, 25 nt, Homo sapiens
  source 1..25: mol_type = unassigned RNA
gcaggggccaaccctgaaccagcag

SEQ ID NO: 7651 - RNA, 25 nt, Homo sapiens
  source 1..25: mol_type = unassigned RNA
ggcaggggccaaccctgaaccagca

SEQ ID NO: 7652 - RNA, 25 nt, Homo sapiens
  source 1..25: mol_type = unassigned RNA
gggcaggggccaaccctgaaccagc

SEQ ID NO: 7653 - RNA, 25 nt, Homo sapiens
  source 1..25: mol_type = unassigned RNA
tgtggttcattccgcagccgggcag

SEQ ID NO: 7654 - RNA, 25 nt, Homo sapiens
  source 1..25: mol_type = unassigned RNA
atgtggttcattccgcagccgggca

SEQ ID NO: 7655 - RNA, 25 nt, Homo sapiens
  source 1..25: mol_type = unassigned RNA
gatgtggttcattccgcagccgggc

SEQ ID NO: 7656 - RNA, 25 nt, Homo sapiens
  source 1..25: mol_type = unassigned RNA
gcaagatgtggttcattccgcagcc

SEQ ID NO: 7657 - RNA, 25 nt, Homo sapiens
  source 1..25: mol_type = unassigned RNA
agcaagatgtggttcattccgcagc

SEQ ID NO: 7658 - RNA, 25 nt, Homo sapiens
  source 1..25: mol_type = unassigned RNA
ctgtgtctgtcagcagagcaagatg

SEQ ID NO: 7659 - RNA, 25 nt, Homo sapiens
  source 1..25: mol_type = unassigned RNA
ctgggcgctaaaggagcctggagcc

SEQ ID NO: 7660 - RNA, 25 nt, Homo sapiens
  source 1..25: mol_type = unassigned RNA
actgggcgctaaaggagcctggagc

SEQ ID NO: 7661 - RNA, 25 nt, Homo sapiens
  source 1..25: mol_type = unassigned RNA
cacccaactgggcgctaaaggagcc

SEQ ID NO: 7662 - RNA, 25 nt, Homo sapiens
  source 1..25: mol_type = unassigned RNA
aggcatccacccaactgggcgctaa

SEQ ID NO: 7663 - RNA, 25 nt, Homo sapiens
  source 1..25: mol_type = unassigned RNA
gctgccaccaggcatccacccaact

SEQ ID NO: 7664 - RNA, 25 nt, Homo sapiens
  source 1..25: mol_type = unassigned RNA
agctgccaccaggcatccacccaac

SEQ ID NO: 7665 - RNA, 25 nt, Homo sapiens
  source 1..25: mol_type = unassigned RNA
tcctgggtggaccgcagctgccacc

SEQ ID NO: 7666 - RNA, 25 nt, Homo sapiens
  source 1..25: mol_type = unassigned RNA
cagagaaggcctcggggctcctggg

SEQ ID NO: 7667 - RNA, 25 nt, Homo sapiens
  source 1..25: mol_type = unassigned RNA
cttcagagaaggcctcggggctcct

SEQ ID NO: 7668 - RNA, 25 nt, Homo sapiens
  source 1..25: mol_type = unassigned RNA
ccttcagagaaggcctcggggctcc

SEQ ID NO: 7669 - RNA, 25 nt, Homo sapiens
  source 1..25: mol_type = unassigned RNA
gcaatgtccttcagagaaggcctcg

SEQ ID NO: 7670 - RNA, 25 nt, Homo sapiens
  source 1..25: mol_type = unassigned RNA
cgcaatgtccttcagagaaggcctc

SEQ ID NO: 7671 - RNA, 25 nt, Homo sapiens
  source 1..25: mol_type = unassigned RNA
ccgcaatgtccttcagagaaggcct

SEQ ID NO: 7672 - RNA, 25 nt, Homo sapiens
  source 1..25: mol_type = unassigned RNA
ggctgtccgcaatgtccttcagaga

SEQ ID NO: 7673 - RNA, 25 nt, Homo sapiens
  source 1..25: mol_type = unassigned RNA
tctgtcactccctctggcctggccg

SEQ ID NO: 7674 - RNA, 25 nt, Homo sapiens
  source 1..25: mol_type = unassigned RNA
gctgcctctgtcactccctctggcc

SEQ ID NO: 7675 - RNA, 25 nt, Homo sapiens
  source 1..25: mol_type = unassigned RNA
atggggctgcctctgtcactccctc

SEQ ID NO: 7676 - RNA, 25 nt, Homo sapiens
  source 1..25: mol_type = unassigned RNA
ggcaggggcctgggcaggcagaatg

SEQ ID NO: 7677 - RNA, 25 nt, Homo sapiens
  source 1..25: mol_type = unassigned RNA
tggcaggggcctgggcaggcagaat

SEQ ID NO: 7678 - RNA, 25 nt, Homo sapiens
  source 1..25: mol_type = unassigned RNA
gtggcaggggcctgggcaggcagaa

SEQ ID NO: 7679 - RNA, 25 nt, Homo sapiens
  source 1..25: mol_type = unassigned RNA
tccccagggtggcaggggcctgggc

SEQ ID NO: 7680 - RNA, 25 nt, Homo sapiens
  source 1..25: mol_type = unassigned RNA
tttctccccagggtggcaggggcct

SEQ ID NO: 7681 - RNA, 25 nt, Homo sapiens
  source 1..25: mol_type = unassigned RNA
ctttctccccagggtggcaggggcc

SEQ ID NO: 7682 - RNA, 25 nt, Homo sapiens
  source 1..25: mol_type = unassigned RNA
ttgtactttctccccagggtggcag

SEQ ID NO: 7683 - RNA, 25 nt, Homo sapiens
  source 1..25: mol_type = unassigned RNA
cttgtactttctccccagggtggca

SEQ ID NO: 7684 - RNA, 25 nt, Homo sapiens
  source 1..25: mol_type = unassigned RNA
tcttgtactttctccccagggtggc

SEQ ID NO: 7685 - RNA, 25 nt, Homo sapiens
  source 1..25: mol_type = unassigned RNA
tttttcttgtactttctccccaggg

SEQ ID NO: 7686 - RNA, 25 nt, Homo sapiens
  source 1..25: mol_type = unassigned RNA
ttttttttcttgtactttctcccca

SEQ ID NO: 7687 - RNA, 25 nt, Homo sapiens
  source 1..25: mol_type = unassigned RNA
tttttttttcttgtactttctcccc

SEQ ID NO: 7688 - RNA, 25 nt, Homo sapiens
  source 1..25: mol_type = unassigned RNA
caaggtgtctggtcggagagcaggg

SEQ ID NO: 7689 - RNA, 25 nt, Homo sapiens
  source 1..25: mol_type = unassigned RNA
tgtcaaggtgtctggtcggagagca

SEQ ID NO: 7690 - RNA, 25 nt, Homo sapiens
  source 1..25: mol_type = unassigned RNA
ctgtcaaggtgtctggtcggagagc

SEQ ID NO: 7691 - RNA, 25 nt, Homo sapiens
  source 1..25: mol_type = unassigned RNA
ggtgtgccctgtcaaggtgtctggt

SEQ ID NO: 7692 - RNA, 25 nt, Homo sapiens
  source 1..25: mol_type = unassigned RNA
gcccggtgtgccctgtcaaggtgtc

SEQ ID NO: 7693 - RNA, 25 nt, Homo sapiens
  source 1..25: mol_type = unassigned RNA
tctgagtgcccggtgtgccctgtca

SEQ ID NO: 7694 - RNA, 25 nt, Homo sapiens
  source 1..25: mol_type = unassigned RNA
tgcccatcagtgtcttctgagtgcc

SEQ ID NO: 7695 - RNA, 25 nt, Homo sapiens
  source 1..25: mol_type = unassigned RNA
gcaatctggggaattagcaggctgg

SEQ ID NO: 7696 - RNA, 25 nt, Homo sapiens
  source 1..25: mol_type = unassigned RNA
tgcaatctggggaattagcaggctg

SEQ ID NO: 7697 - RNA, 25 nt, Homo sapiens
  source 1..25: mol_type = unassigned RNA
ttgcaatctggggaattagcaggct

SEQ ID NO: 7698 - RNA, 25 nt, Homo sapiens
  source 1..25: mol_type = unassigned RNA
gttgcaatctggggaattagcaggc

SEQ ID NO: 7699 - RNA, 25 nt, Homo sapiens
  source 1..25: mol_type = unassigned RNA
gcctgttgcaatctggggaattagc

SEQ ID NO: 7700 - RNA, 25 nt, Homo sapiens
  source 1..25: mol_type = unassigned RNA
ctgaagcccagcctgttgcaatctg

SEQ ID NO: 7701 - RNA, 25 nt, Homo sapiens
  source 1..25: mol_type = unassigned RNA
actgaagcccagcctgttgcaatct

SEQ ID NO: 7702 - RNA, 25 nt, Homo sapiens
  source 1..25: mol_type = unassigned RNA
cactgaagcccagcctgttgcaatc

SEQ ID NO: 7703 - RNA, 25 nt, Homo sapiens
  source 1..25: mol_type = unassigned RNA
atctggccaggcctagctttggctt

SEQ ID NO: 7704 - RNA, 25 nt, Homo sapiens
  source 1..25: mol_type = unassigned RNA
tggtgcatctggccaggcctagctt

SEQ ID NO: 7705 - RNA, 25 nt, Homo sapiens
  source 1..25: mol_type = unassigned RNA
ctgctaagggctggtgcatctggcc

SEQ ID NO: 7706 - RNA, 25 nt, Homo sapiens
  source 1..25: mol_type = unassigned RNA
tttccctgctaagggctggtgcatc

SEQ ID NO: 7707 - RNA, 25 nt, Homo sapiens
  source 1..25: mol_type = unassigned RNA
cattagctgtttccctgctaagggc

SEQ ID NO: 7708 - RNA, 25 nt, Homo sapiens
  source 1..25: mol_type = unassigned RNA
gtcccattagctgtttccctgctaa

SEQ ID NO: 7709 - RNA, 25 nt, Homo sapiens
  source 1..25: mol_type = unassigned RNA
tgtcccattagctgtttccctgcta

SEQ ID NO: 7710 - RNA, 25 nt, Homo sapiens
  source 1..25: mol_type = unassigned RNA
tttataatgtagtgaaaaaagacac

SEQ ID NO: 7711 - RNA, 25 nt, Homo sapiens
  source 1..25: mol_type = unassigned RNA
ggtaacagggtatgaactcaaaccc

SEQ ID NO: 7712 - RNA, 25 nt, Homo sapiens
  source 1..25: mol_type = unassigned RNA
gtgtgggtaccccaaaatggtaaca

SEQ ID NO: 7713 - RNA, 25 nt, Homo sapiens
  source 1..25: mol_type = unassigned RNA
cgtgtgggtaccccaaaatggtaac

SEQ ID NO: 7714 - RNA, 25 nt, Homo sapiens
  source 1..25: mol_type = unassigned RNA
ttggtctcgtgtgggtaccccaaaa

SEQ ID NO: 7715 - RNA, 25 nt, Homo sapiens
  source 1..25: mol_type = unassigned RNA
aatgtataatctattggtctcgtgt

SEQ ID NO: 7716 - RNA, 25 nt, Homo sapiens
  source 1..25: mol_type = unassigned RNA
caatgtataatctattggtctcgtg

SEQ ID NO: 7717 - RNA, 20 nt, Homo sapiens
  source 1..20: mol_type = unassigned RNA
ggcatccttggggaagctga

SEQ ID NO: 7718 - RNA, 20 nt, Homo sapiens
  source 1..20: mol_type = unassigned RNA
tcgtgccctcagcttcccca

SEQ ID NO: 7719 - RNA, 20 nt, Homo sapiens
  source 1..20: mol_type = unassigned RNA
ttggggaagctgagggcacg

SEQ ID NO: 7720 - RNA, 20 nt, Homo sapiens
  source 1..20: mol_type = unassigned RNA
gggaagctgagggcacgagg

SEQ ID NO: 7721 - RNA, 20 nt, Homo sapiens
  source 1..20: mol_type = unassigned RNA
ggaagctgagggcacgagga

SEQ ID NO: 7722 - RNA, 20 nt, Homo sapiens
  source 1..20: mol_type = unassigned RNA
gaagctgagggcacgaggag

SEQ ID NO: 7723 - RNA, 20 nt, Homo sapiens
  source 1..20: mol_type = unassigned RNA
gaggaggggctgccagactc

SEQ ID NO: 7724 - RNA, 20 nt, Homo sapiens
  source 1..20: mol_type = unassigned RNA
aggaggggctgccagactcc

SEQ ID NO: 7725 - RNA, 20 nt, Homo sapiens
  source 1..20: mol_type = unassigned RNA
aggcagcagctcccggagtc

SEQ ID NO: 7726 - RNA, 20 nt, Homo sapiens
  source 1..20: mol_type = unassigned RNA
agactccgggagctgctgcc

SEQ ID NO: 7727 - RNA, 20 nt, Homo sapiens
  source 1..20: mol_type = unassigned RNA
tccgggagctgctgcctggc

SEQ ID NO: 7728 - RNA, 20 nt, Homo sapiens
  source 1..20: mol_type = unassigned RNA
ccgggagctgctgcctggct

SEQ ID NO: 7729 - RNA, 20 nt, Homo sapiens
  source 1..20: mol_type = unassigned RNA
cccagccaggcagcagctcc

SEQ ID NO: 7730 - RNA, 20 nt, Homo sapiens
  source 1..20: mol_type = unassigned RNA
attgtgtaggaatcccagcc

SEQ ID NO: 7731 - RNA, 20 nt, Homo sapiens
  source 1..20: mol_type = unassigned RNA
ttcctacacaatgcgttgcc

SEQ ID NO: 7732 - RNA, 20 nt, Homo sapiens
  source 1..20: mol_type = unassigned RNA
agccaggcaacgcattgtgt

SEQ ID NO: 7733 - RNA, 20 nt, Homo sapiens
  source 1..20: mol_type = unassigned RNA
tgcctggctccacgccctgc

SEQ ID NO: 7734 - RNA, 20 nt, Homo sapiens
  source 1..20: mol_type = unassigned RNA
gcctggctccacgccctgct

SEQ ID NO: 7735 - RNA, 20 nt, Homo sapiens
  source 1..20: mol_type = unassigned RNA
acccagcagggcgtggagcc

SEQ ID NO: 7736 - RNA, 20 nt, Homo sapiens
  source 1..20: mol_type = unassigned RNA
aggtaggacccagcagggcg

SEQ ID NO: 7737 - RNA, 20 nt, Homo sapiens
  source 1..20: mol_type = unassigned RNA
ctgacaggtaggacccagca

SEQ ID NO: 7738 - RNA, 20 nt, Homo sapiens
  source 1..20: mol_type = unassigned RNA
tctgacaggtaggacccagc

SEQ ID NO: 7739 - RNA, 20 nt, Homo sapiens
  source 1..20: mol_type = unassigned RNA
cagctcacagtgtgccacca

SEQ ID NO: 7740 - RNA, 20 nt, Homo sapiens
  source 1..20: mol_type = unassigned RNA
acagtgtgccaccatggagt

SEQ ID NO: 7741 - RNA, 20 nt, Homo sapiens
  source 1..20: mol_type = unassigned RNA
cagtgtgccaccatggagtt

SEQ ID NO: 7742 - RNA, 20 nt, Homo sapiens
  source 1..20: mol_type = unassigned RNA
agtgtgccaccatggagttg

SEQ ID NO: 7743 - RNA, 20 nt, Homo sapiens
  source 1..20: mol_type = unassigned RNA
taggggccccaactccatgg

SEQ ID NO: 7744 - RNA, 20 nt, Homo sapiens
  source 1..20: mol_type = unassigned RNA
ttctaggggccccaactcca

SEQ ID NO: 7745 - RNA, 20 nt, Homo sapiens
  source 1..20: mol_type = unassigned RNA
atggagttggggcccctaga

SEQ ID NO: 7746 - RNA, 20 nt, Homo sapiens
  source 1..20: mol_type = unassigned RNA
gagttggggcccctagaagg

SEQ ID NO: 7747 - RNA, 20 nt, Homo sapiens
  source 1..20: mol_type = unassigned RNA
gcccctagaaggtggctacc

SEQ ID NO: 7748 - RNA, 20 nt, Homo sapiens
  source 1..20: mol_type = unassigned RNA
tccaggtagccaccttctag

SEQ ID NO: 7749 - RNA, 20 nt, Homo sapiens
  source 1..20: mol_type = unassigned RNA
ctccaggtagccaccttcta

SEQ ID NO: 7750 - RNA, 20 nt, Homo sapiens
  source 1..20: mol_type = unassigned RNA
gctccaggtagccaccttct

SEQ ID NO: 7751 - RNA, 20 nt, Homo sapiens
  source 1..20: mol_type = unassigned RNA
catcgctgttaagaagctcc

SEQ ID NO: 7752 - RNA, 20 nt, Homo sapiens
  source 1..20: mol_type = unassigned RNA
agaagtggtagaggcacagg

SEQ ID NO: 7753 - RNA, 20 nt, Homo sapiens
  source 1..20: mol_type = unassigned RNA
tagaagtggtagaggcacag

SEQ ID NO: 7754 - RNA, 20 nt, Homo sapiens
  source 1..20: mol_type = unassigned RNA
atagaagtggtagaggcaca

SEQ ID NO: 7755 - RNA, 20 nt, Homo sapiens
  source 1..20: mol_type = unassigned RNA
catagaagtggtagaggcac

SEQ ID NO: 7756 - RNA, 20 nt, Homo sapiens
  source 1..20: mol_type = unassigned RNA
tctggtcatagaagtggtag

SEQ ID NO: 7757 - RNA, 20 nt, Homo sapiens
  source 1..20: mol_type = unassigned RNA
ctaccacttctatgaccaga

SEQ ID NO: 7758 - RNA, 20 nt, Homo sapiens
  source 1..20: mol_type = unassigned RNA
ggtccatctggtcatagaag

SEQ ID NO: 7759 - RNA, 20 nt, Homo sapiens
  source 1..20: mol_type = unassigned RNA
cttctatgaccagatggacc

SEQ ID NO: 7760 - RNA, 20 nt, Homo sapiens
  source 1..20: mol_type = unassigned RNA
tatgaccagatggacctggc

SEQ ID NO: 7761 - RNA, 20 nt, Homo sapiens
  source 1..20: mol_type = unassigned RNA
cttctccagccaggtccatc

SEQ ID NO: 7762 - RNA, 20 nt, Homo sapiens
  source 1..20: mol_type = unassigned RNA
caatctcttcttctccagcc

SEQ ID NO: 7763 - RNA, 20 nt, Homo sapiens
  source 1..20: mol_type = unassigned RNA
cagttgatggtgtctgtgtc

SEQ ID NO: 7764 - RNA, 20 nt, Homo sapiens
  source 1..20: mol_type = unassigned RNA
gcagttgatggtgtctgtgt

SEQ ID NO: 7765 - RNA, 20 nt, Homo sapiens
  source 1..20: mol_type = unassigned RNA
gctgaactggtcgcagttga

SEQ ID NO: 7766 - RNA, 20 nt, Homo sapiens
  source 1..20: mol_type = unassigned RNA
tcaactgcgaccagttcagc

SEQ ID NO: 7767 - RNA, 20 nt, Homo sapiens
  source 1..20: mol_type = unassigned RNA
cacacaacagcctgctgaac

SEQ ID NO: 7768 - RNA, 20 nt, Homo sapiens
  source 1..20: mol_type = unassigned RNA
cagcaggctgttgtgtgaca

SEQ ID NO: 7769 - RNA, 20 nt, Homo sapiens
  source 1..20: mol_type = unassigned RNA
aggctgttgtgtgacatgga

SEQ ID NO: 7770 - RNA, 20 nt, Homo sapiens
  source 1..20: mol_type = unassigned RNA
tggaaggtgatgaagagacc

SEQ ID NO: 7771 - RNA, 20 nt, Homo sapiens
  source 1..20: mol_type = unassigned RNA
ggaaggtgatgaagagacca

SEQ ID NO: 7772 - RNA, 20 nt, Homo sapiens
  source 1..20: mol_type = unassigned RNA
aggtgatgaagagaccaggg

SEQ ID NO: 7773 - RNA, 20 nt, Homo sapiens
  source 1..20: mol_type = unassigned RNA
gatattggcataagcctccc

SEQ ID NO: 7774 - RNA, 20 nt, Homo sapiens
  source 1..20: mol_type = unassigned RNA
aggtgcttcctcaccgatat

SEQ ID NO: 7775 - RNA, 20 nt, Homo sapiens
  source 1..20: mol_type = unassigned RNA
actggaccagtatgtcttcc

SEQ ID NO: 7776 - RNA, 20 nt, Homo sapiens
  source 1..20: mol_type = unassigned RNA
gggagtcctggaagacatac

SEQ ID NO: 7777 - RNA, 20 nt, Homo sapiens
  source 1..20: mol_type = unassigned RNA
tgtcttccaggactcccagc

SEQ ID NO: 7778 - RNA, 20 nt, Homo sapiens
  source 1..20: mol_type = unassigned RNA
cttccaggactcccagctgg

SEQ ID NO: 7779 - RNA, 20 nt, Homo sapiens
  source 1..20: mol_type = unassigned RNA
ttccaggactcccagctgga

SEQ ID NO: 7780 - RNA, 20 nt, Homo sapiens
  source 1..20: mol_type = unassigned RNA
ggccctccagctgggagtcc

SEQ ID NO: 7781 - RNA, 20 nt, Homo sapiens
  source 1..20: mol_type = unassigned RNA
cttgctcaggccctccagct

SEQ ID NO: 7782 - RNA, 20 nt, Homo sapiens
  source 1..20: mol_type = unassigned RNA
ccttgctcaggccctccagc

SEQ ID NO: 7783 - RNA, 20 nt, Homo sapiens
  source 1..20: mol_type = unassigned RNA
ccagctggagggcctgagca

SEQ ID NO: 7784 - RNA, 20 nt, Homo sapiens
  source 1..20: mol_type = unassigned RNA
tactgaaaatgtccttgctc

SEQ ID NO: 7785 - RNA, 20 nt, Homo sapiens
  source 1..20: mol_type = unassigned RNA
ataggaccagatgaagtgat

SEQ ID NO: 7786 - RNA, 20 nt, Homo sapiens
  source 1..20: mol_type = unassigned RNA
ctctcaccgatcacttcatc

SEQ ID NO: 7787 - RNA, 20 nt, Homo sapiens
  source 1..20: mol_type = unassigned RNA
tgaagtgatcggtgagagta

SEQ ID NO: 7788 - RNA, 20 nt, Homo sapiens
  source 1..20: mol_type = unassigned RNA
atggagatgccagcagaagt

SEQ ID NO: 7789 - RNA, 20 nt, Homo sapiens
  source 1..20: mol_type = unassigned RNA
tggagatgccagcagaagtt

SEQ ID NO: 7790 - RNA, 20 nt, Homo sapiens
  source 1..20: mol_type = unassigned RNA
cttttctgcccaacttctgc

SEQ ID NO: 7791 - RNA, 20 nt, Homo sapiens
  source 1..20: mol_type = unassigned RNA
tgccggaagctcctctggga

SEQ ID NO: 7792 - RNA, 20 nt, Homo sapiens
  source 1..20: mol_type = unassigned RNA
ggtctgccggaagctcctct

SEQ ID NO: 7793 - RNA, 20 nt, Homo sapiens
  source 1..20: mol_type = unassigned RNA
aggtctgccggaagctcctc

SEQ ID NO: 7794 - RNA, 20 nt, Homo sapiens
  source 1..20: mol_type = unassigned RNA
ttccggcagacctgaagcac

SEQ ID NO: 7795 - RNA, 20 nt, Homo sapiens
  source 1..20: mol_type = unassigned RNA
ttccagtgcttcaggtctgc

SEQ ID NO: 7796 - RNA, 20 nt, Homo sapiens
  source 1..20: mol_type = unassigned RNA
gagccccccactgtggtgac

SEQ ID NO: 7797 - RNA, 20 nt, Homo sapiens
  source 1..20: mol_type = unassigned RNA
ctgccagtcaccacagtggg

SEQ ID NO: 7798 - RNA, 20 nt, Homo sapiens
  source 1..20: mol_type = unassigned RNA
actgccagtcaccacagtgg

SEQ ID NO: 7799 - RNA, 20 nt, Homo sapiens
  source 1..20: mol_type = unassigned RNA
gactgccagtcaccacagtg

SEQ ID NO: 7800 - RNA, 20 nt, Homo sapiens
  source 1..20: mol_type = unassigned RNA
agactgccagtcaccacagt

SEQ ID NO: 7801 - RNA, 20 nt, Homo sapiens
  source 1..20: mol_type = unassigned RNA
gagactgccagtcaccacag

SEQ ID NO: 7802 - RNA, 20 nt, Homo sapiens
  source 1..20: mol_type = unassigned RNA
ggtgactggcagtctcctag

SEQ ID NO: 7803 - RNA, 20 nt, Homo sapiens
  source 1..20: mol_type = unassigned RNA
gtgactggcagtctcctagt

SEQ ID NO: 7804 - RNA, 20 nt, Homo sapiens
  source 1..20: mol_type = unassigned RNA
agtcgctcactggtcccact

SEQ ID NO: 7805 - skipped

SEQ ID NO: 7806 - RNA, 16 nt, synthetic construct
  misc_feature 1..16: note = Description of Artificial Sequence: Synthetic oligonucleotide
  source 1..16: mol_type = other RNA
gttttagagctatgct

SEQ ID NO: 7807 - RNA, 90 nt, synthetic construct
  misc_feature 1..90: note = Description of Artificial Sequence: Synthetic oligonucleotide
  source 1..90: mol_type = other RNA
gtttaagagctatgctggaaacagcatagcaagtttaaataaggctagtccgttatcaacttgaaaaagtggcaccgagtcggtgctttt

SEQ ID NO: 7808 - RNA, 67 nt, synthetic construct
  misc_feature 1..67: note = Description of Artificial Sequence: Synthetic oligonucleotide
  source 1..67: mol_type = other RNA
agcatagcaagttaaaataaggctagtccgttatcaacttgaaaaagtggcaccgagtcggtgcttt

SEQ ID NO: 7809 - RNA, 85 nt, synthetic construct
  misc_feature 1..85: note = Description of Artificial Sequence: Synthetic oligonucleotide
  source 1..85: mol_type = other RNA
gttggaaccattcaaaacagcatagcaagttaaaataaggctagtccgttatcaacttgaaaaagtggcaccgagtcggtgcttt

SEQ ID NO: 7810 - protein, 7 aa, Tobacco etch virus
ENLYFQG

SEQ ID NO: 7811 - RNA, 80 nt, synthetic construct
  misc_feature 1..80: note = Description of Artificial Sequence: Synthetic oligonucleotide
  source 1..80: mol_type = other RNA
gttttagagctagaaatagcaagttaaaataaggctagtccgttatcaacttgaaaaagtggcaccgagtcggtgctttt

SEQ ID NO: 7812 - protein, 243 aa, synthetic construct
  REGION 1..243: note = Description of Artificial Sequence: Synthetic polypeptide
QVQLVQSGAEVKKPGASVKVSCKASGYTFTGYYMHWVRQAPGQGLEWMGWINPNSGGTNYAQKFQGRVTMTRDTSISTAYMELSRLRSDDTAVYYCARDMNILATVPFDIWGQGTMVTVSSGGGGSGGGGSGGGGSDIQMTQSPSSLSASVGDRVTITCRASQSISTYLNWYQQKPGKAPNLLIYAAFSLQSGVPSRFSGSGSGTDFTLTINSLQPEDFATYYCQQGDSVPLTFGGGTKLEIK

SEQ ID NO: 7813 - protein, 243 aa, synthetic construct
  REGION 1..243: note = Description of Artificial Sequence: Synthetic polypeptide
QVQLVQSGAEVKKPGASVKVSCKASGYTFTGYYMHWVRQAPGQGLEWMGWINPNSGGTNYAQKFQGRVTLTRDTSISTVYMELSRLRSDDTAVYYCARDMNILATVPFDIWGQGTMVTVSSGGGGSGGGGSGGGGSDIQMTQSPSSLSASVGDRVTITCRASQSISSYLNWYQQKPGKAPKLLIYAASSLQSGVPSRFSGSGSGTDFTLTVNSLQPEDFATYYCQQGDSVPLTFGGGTRLEIK

SEQ ID NO: 7814 - protein, 243 aa, synthetic construct
  REGION 1..243: note = Description of Artificial Sequence: Synthetic polypeptide
QVQLVQSGAEVKKPGASVKVSCKASGYIFTGYYIHWVRQAPGQGLEWMGWINPNSGGTNYAQKFQGRVTMTRDTSISTAYMELSGLRSDDPAVYYCARDMNILATVPFDIWGQGTLVTVSSGGGGSGGGGSGGGGSDIQLTQSPSSLSASVGDRVTITCRASQSISSYLNWYQQKPGKAPKLLIYAASSLQSGVPSRFSGSGSGTDFTLTVNSLQPEDFATYYCQQGDSVPLTFGGGTKVEIK

SEQ ID NO: 7815 - protein, 245 aa, synthetic construct
  REGION 1..245: note = Description of Artificial Sequence: Synthetic polypeptide
QVQLQQSGAEVKKSGASVKVSCKASGYTFTDYYMHWLRQAPGQGLEWMGWINPNSGDTNYAQKFQGRVTLTRDTSISTVYMELSRLRSDDTAVYYCARDMNILATVPFDIWGQGTMVTVSSASGGGGSGGRASGGGGSDIQMTQSPSSLSASVGDRVTITCRASQSISSYLNWYQQKPGKAPKLLIYAASSLQSGVPSRFSGSGSGTDFTLTISSLQPEDFATYYCQQGDSVPLTFGGGTKVEIK

SEQ ID NO: 7816 - protein, 487 aa, synthetic construct
  REGION 1..487: note = Description of Artificial Sequence: Synthetic polypeptide
MALPVTALLLPLALLLHAARPQVQLVQSGAEVKKPGASVKVSCKASGYTFTGYYMHWVRQAPGQGLEWMGWINPNSGGTNYAQKFQGRVTLTRDTSISTVYMELSRLRSDDTAVYYCARDMNILATVPFDIWGQGTMVTVSSGGGGSGGGGSGGGGSDIQMTQSPSSLSASVGDRVTITCRASQSISSYLNWYQQKPGKAPKLLIYAASSLQSGVPSRFSGSGSGTDFTLTVNSLQPEDFATYYCQQGDSVPLTFGGGTRLEIKTTTPAPRPPTPAPTIASQPLSLRPEACRPAAGGAVHTRGLDFACDIYIWAPLAGTCGVLLLSLVITLYCKRGRKKLLYIFKQPFMRPVQTTQEEDGCSCRFPEEEEGGCELRVKFSRSADAPAYKQGQNQLYNELNLGRREEYDVLDKRRGRDPEMGGKPRRKNPQEGLYNELQKDKMAEAYSEIGMKGERRRGKGHDGLYQGLSTATKDTYDALHMQALPPR

SEQ ID NO: 7817 - protein, 487 aa, synthetic construct
  REGION 1..487: note = Description of Artificial Sequence: Synthetic polypeptide
MALPVTALLLPLALLLHAARPQVQLVQSGAEVKKPGASVKVSCKASGYIFTGYYIHWVRQAPGQGLEWMGWINPNSGGTNYAQKFQGRVTMTRDTSISTAYMELSGLRSDDPAVYYCARDMNILATVPFDIWGQGTLVTVSSGGGGSGGGGSGGGGSDIQLTQSPSSLSASVGDRVTITCRASQSISSYLNWYQQKPGKAPKLLIYAASSLQSGVPSRFSGSGSGTDFTLTVNSLQPEDFATYYCQQGDSVPLTFGGGTKVEIKTTTPAPRPPTPAPTIASQPLSLRPEACRPAAGGAVHTRGLDFACDIYIWAPLAGTCGVLLLSLVITLYCKRGRKKLLYIFKQPFMRPVQTTQEEDGCSCRFPEEEEGGCELRVKFSRSADAPAYKQGQNQLYNELNLGRREEYDVLDKRRGRDPEMGGKPRRKNPQEGLYNELQKDKMAEAYSEIGMKGERRRGKGHDGLYQGLSTATKDTYDALHMQALPPR

SEQ ID NO: 7818 - protein, 336 aa, synthetic construct
  REGION 1..336: note = Description of Artificial Sequence: Synthetic polypeptide
MALPVTALLLPLALLLHAARPQVQLQQSGAEVKKSGASVKVSCKASGYTFTDYYMHWLRQAPGQGLEWMGWINPNSGDTNYAQKFQGRVTLTRDTSISTVYMELSRLRSDDTAVYYCARDMNILATVPFDIWGQGTMVTVSSASGGGGSGGRASGGGGSDIQMTQSPSSLSASVGDRVTITCRASQSISSYLNWYQQKPGKAPKLLIYAASSLQSGVPSRFSGSGSGTDFTLTISSLQPEDFATYYCQQGDSVPLTFGGGTKVEIKTTTPAPRPPTPAPTIASQPLSLRPEACRPAAGGAVHTRGLDFACDIYIWAPLAGTCGVLLLSLVITLYCK

SEQ ID NO: 7819 - protein, 487 aa, synthetic construct
  REGION 1..487: note = Description of Artificial Sequence: Synthetic polypeptide
MALPVTALLLPLALLLHAARPQVQLVQSGAEVKKPGASVKVSCKASGYTFTGYYMHWVRQAPGQGLEWMGWINPNSGGTNYAQKFQGRVTMTRDTSISTAYMELSRLRSDDTAVYYCARDMNILATVPFDIWGQGTMVTVSSGGGGSGGGGSGGGGSDIQMTQSPSSLSASVGDRVTITCRASQSISTYLNWYQQKPGKAPNLLIYAAFSLQSGVPSRFSGSGSGTDFTLTINSLQPEDFATYYCQQGDSVPLTFGGGTKLEIKTTTPAPRPPTPAPTIASQPLSLRPEACRPAAGGAVHTRGLDFACDIYIWAPLAGTCGVLLLSLVITLYCKRGRKKLLYIFKQPFMRPVQTTQEEDGCSCRFPEEEEGGCELRVKFSRSADAPAYKQGQNQLYNELNLGRREEYDVLDKRRGRDPEMGGKPRRKNPQEGLYNELQKDKMAEAYSEIGMKGERRRGKGHDGLYQGLSTATKDTYDALHMQALPPR

SEQ ID NO: 7820 - RNA, 67 nt, synthetic construct
  misc_feature 1..67: note = Description of Artificial Sequence: Synthetic oligonucleotide
  source 1..67: mol_type = other RNA
aacagcatagcaagttaaaataaggctagtccgttatcaacttgaaaaagtggcaccgagtcggtgc

SEQ ID NO: 7821 - protein, 1393 aa, synthetic construct
  REGION 1..1393: note = Description of Artificial Sequence: Synthetic polypeptide
MAPKKKRKVDKKYSIGLDIGTNSVGWAVITDEYKVPSKKFKVLGNTDRHSIKKNLIGALLFDSGETAEATRLKRTARRRYTRRKNRICYLQEIFSNEMAKVDDSFFHRLEESFLVEEDKKHERHPIFGNIVDEVAYHEKYPTIYHLRKKLVDSTDKADLRLIYLALAHMIKFRGHFLIEGDLNPDNSDVDKLFIQLVQTYNQLFEENPINASGVDAKAILSARLSKSRRLENLIAQLPGEKKNGLFGNLIALSLGLTPNFKSNFDLAEDAKLQLSKDTYDDDLDNLLAQIGDQYADLFLAAKNLSDAILLSDILRVNTEITKAPLSASMIKRYDEHHQDLTLLKALVRQQLPEKYKEIFFDQSKNGYAGYIDGGASQEEFYKFIKPILEKMDGTEELLVKLNREDLLRKQRTFDNGSIPHQIHLGELHAILRRQEDFYPFLKDNREKIEKILTFRIPYYVGPLARGNSRFAWMTRKSEETITPWNFEEVVDKGASAQSFIERMTNFDKNLPNEKVLPKHSLLYEYFTVYNELTKVKYVTEGMRKPAFLSGEQKKAIVDLLFKTNRKVTVKQLKEDYFKKIECFDSVEISGVEDRFNASLGTYHDLLKIIKDKDFLDNEENEDILEDIVLTLTLFEDREMIEERLKTYAHLFDDKVMKQLKRRRYTGWGRLSRKLINGIRDKQSGKTILDFLKSDGFANRNFMQLIHDDSLTFKEDIQKAQVSGQGDSLHEHIANLAGSPAIKKGILQTVKVVDELVKVMGRHKPENIVIEMARENQTTQKGQKNSRERMKRIEEGIKELGSQILKEHPVENTQLQNEKLYLYYLQNGRDMYVDQELDINRLSDYDVDHIVPQSFLKDDSIDNKVLTRSDKNRGKSDNVPSEEVVKKMKNYWRQLLNAKLITQRKFDNLTKAERGGLSELDKAGFIKRQLVETRQITKHVAQILDSRMNTKYDENDKLIREVKVITLKSKLVSDFRKDFQFYKVREINNYHHAHDAYLNAVVGTALIKKYPKLESEFVYGDYKVYDVRKMIAKSEQEIGKATAKYFFYSNIMNFFKTEITLANGEIRKRPLIETNGETGEIVWDKGRDFATVRKVLSMPQVNIVKKTEVQTGGFSKESILPKRNSDKLIARKKDWDPKKYGGFDSPTVAYSVLVVAKVEKGKSKKLKSVKELLGITIMERSSFEKNPIDFLEAKGYKEVKKDLIIKLPKYSLFELENGRKRMLASAGELQKGNELALPSKYVNFLYLASHYEKLKGSPEDNEQKQLFVEQHKHYLDEIIEQISEFSKRVILADANLDKVLSAYNKHRDKPIREQAENIIHLFTLTNLGAPAAFKYFDTTIDRKRYTSTKEVLDATLIHQSITGLYETRIDLSQLGGDSRADPKKKRKVHHHHHH

SEQ ID NO: 7822 - protein, 1393 aa, synthetic construct
  REGION 1..1393: note = Description of Artificial Sequence: Synthetic polypeptide
MAPKKKRKVDKKYSIGLDIGTNSVGWAVITDEYKVPSKKFKVLGNTDRHSIKKNLIGALLFDSGETAEATRLKRTARRRYTRRKNRILYLQEIFSNEMAKVDDSFFHRLEESFLVEEDKKHERHPIFGNIVDEVAYHEKYPTIYHLRKKLVDSTDKADLRLIYLALAHMIKFRGHFLIEGDLNPDNSDVDKLFIQLVQTYNQLFEENPINASGVDAKAILSARLSKSRRLENLIAQLPGEKKNGLFGNLIALSLGLTPNFKSNFDLAEDAKLQLSKDTYDDDLDNLLAQIGDQYADLFLAAKNLSDAILLSDILRVNTEITKAPLSASMIKRYDEHHQDLTLLKALVRQQLPEKYKEIFFDQSKNGYAGYIDGGASQEEFYKFIKPILEKMDGTEELLVKLNREDLLRKQRTFDNGSIPHQIHLGELHAILRRQEDFYPFLKDNREKIEKILTFRIPYYVGPLARGNSRFAWMTRKSEETITPWNFEEVVDKGASAQSFIERMTNFDKNLPNEKVLPKHSLLYEYFTVYNELTKVKYVTEGMRKPAFLSGEQKKAIVDLLFKTNRKVTVKQLKEDYFKKIEEFDSVEISGVEDRFNASLGTYHDLLKIIKDKDFLDNEENEDILEDIVLTLTLFEDREMIEERLKTYAHLFDDKVMKQLKRRRYTGWGRLSRKLINGIRDKQSGKTILDFLKSDGFANRNFMQLIHDDSLTFKEDIQKAQVSGQGDSLHEHIANLAGSPAIKKGILQTVKVVDELVKVMGRHKPENIVIEMARENQTTQKGQKNSRERMKRIEEGIKELGSQILKEHPVENTQLQNEKLYLYYLQNGRDMYVDQELDINRLSDYDVDHIVPQSFLKDDSIDNKVLTRSDKNRGKSDNVPSEEVVKKMKNYWRQLLNAKLITQRKFDNLTKAERGGLSELDKAGFIKRQLVETRQITKHVAQILDSRMNTKYDENDKLIREVKVITLKSKLVSDFRKDFQFYKVREINNYHHAHDAYLNAVVGTALIKKYPKLESEFVYGDYKVYDVRKMIAKSEQEIGKATAKYFFYSNIMNFFKTEITLANGEIRKRPLIETNGETGEIVWDKGRDFATVRKVLSMPQVNIVKKTEVQTGGFSKESILPKRNSDKLIARKKDWDPKKYGGFDSPTVAYSVLVVAKVEKGKSKKLKSVKELLGITIMERSSFEKNPIDFLEAKGYKEVKKDLIIKLPKYSLFELENGRKRMLASAGELQKGNELALPSKYVNFLYLASHYEKLKGSPEDNEQKQLFVEQHKHYLDEIIEQISEFSKRVILADANLDKVLSAYNKHRDKPIREQAENIIHLFTLTNLGAPAAFKYFDTTIDRKRYTSTKEVLDATLIHQSITGLYETRIDLSQLGGDSRADPKKKRKVHHHHHH

SEQ ID NO: 7823 - protein, 1399 aa, synthetic construct
  REGION 1..1399: note = Description of Artificial Sequence: Synthetic polypeptide
MGSSHHHHHHHHENLYFQGSMDKKYSIGLDIGTNSVGWAVITDEYKVPSKKFKVLGNTDRHSIKKNLIGALLFDSGETAEATRLKRTARRRYTRRKNRICYLQEIFSNEMAKVDDSFFHRLEESFLVEEDKKHERHPIFGNIVDEVAYHEKYPTIYHLRKKLVDSTDKADLRLIYLALAHMIKFRGHFLIEGDLNPDNSDVDKLFIQLVQTYNQLFEENPINASGVDAKAILSARLSKSRRLENLIAQLPGEKKNGLFGNLIALSLGLTPNFKSNFDLAEDAKLQLSKDTYDDDLDNLLAQIGDQYADLFLAAKNLSDAILLSDILRVNTEITKAPLSASMIKRYDEHHQDLTLLKALVRQQLPEKYKEIFFDQSKNGYAGYIDGGASQEEFYKFIKPILEKMDGTEELLVKLNREDLLRKQRTFDNGSIPHQIHLGELHAILRRQEDFYPFLKDNREKIEKILTFRIPYYVGPLARGNSRFAWMTRKSEETITPWNFEEVVDKGASAQSFIERMTNFDKNLPNEKVLPKHSLLYEYFTVYNELTKVKYVTEGMRKPAFLSGEQKKAIVDLLFKTNRKVTVKQLKEDYFKKIECFDSVEISGVEDRFNASLGTYHDLLKIIKDKDFLDNEENEDILEDIVLTLTLFEDREMIEERLKTYAHLFDDKVMKQLKRRRYTGWGRLSRKLINGIRDKQSGKTILDFLKSDGFANRNFMQLIHDDSLTFKEDIQKAQVSGQGDSLHEHIANLAGSPAIKKGILQTVKVVDELVKVMGRHKPENIVIEMARENQTTQKGQKNSRERMKRIEEGIKELGSQILKEHPVENTQLQNEKLYLYYLQNGRDMYVDQELDINRLSDYDVDHIVPQSFLKDDSIDNKVLTRSDKNRGKSDNVPSEEVVKKMKNYWRQLLNAKLITQRKFDNLTKAERGGLSELDKAGFIKRQLVETRQITKHVAQILDSRMNTKYDENDKLIREVKVITLKSKLVSDFRKDFQFYKVREINNYHHAHDAYLNAVVGTALIKKYPKLESEFVYGDYKVYDVRKMIAKSEQEIGKATAKYFFYSNIMNFFKTEITLANGEIRKRPLIETNGETGEIVWDKGRDFATVRKVLSMPQVNIVKKTEVQTGGFSKESILPKRNSDKLIARKKDWDPKKYGGFDSPTVAYSVLVVAKVEKGKSKKLKSVKELLGITIMERSSFEKNPIDFLEAKGYKEVKKDLIIKLPKYSLFELENGRKRMLASAGELQKGNELALPSKYVNFLYLASHYEKLKGSPEDNEQKQLFVEQHKHYLDEIIEQISEFSKRVILADANLDKVLSAYNKHRDKPIREQAENIIHLFTLTNLGAPAAFKYFDTTIDRKRYTSTKEVLDATLIHQSITGLYETRIDLSQLGGDGGGSPKKKRKV

SEQ ID NO: 7824 - protein, 1396 aa, synthetic construct
  REGION 1..1396: note = Description of Artificial Sequence: Synthetic polypeptide
MAHHHHHHGGSPKKKRKVDKKYSIGLDIGTNSVGWAVITDEYKVPSKKFKVLGNTDRHSIKKNLIGALLFDSGETAEATRLKRTARRRYTRRKNRICYLQEIFSNEMAKVDDSFFHRLEESFLVEEDKKHERHPIFGNIVDEVAYHEKYPTIYHLRKKLVDSTDKADLRLIYLALAHMIKFRGHFLIEGDLNPDNSDVDKLFIQLVQTYNQLFEENPINASGVDAKAILSARLSKSRRLENLIAQLPGEKKNGLFGNLIALSLGLTPNFKSNFDLAEDAKLQLSKDTYDDDLDNLLAQIGDQYADLFLAAKNLSDAILLSDILRVNTEITKAPLSASMIKRYDEHHQDLTLLKALVRQQLPEKYKEIFFDQSKNGYAGYIDGGASQEEFYKFIKPILEKMDGTEELLVKLNREDLLRKQRTFDNGSIPHQIHLGELHAILRRQEDFYPFLKDNREKIEKILTFRIPYYVGPLARGNSRFAWMTRKSEETITPWNFEEVVDKGASAQSFIERMTNFDKNLPNEKVLPKHSLLYEYFTVYNELTKVKYVTEGMRKPAFLSGEQKKAIVDLLFKTNRKVTVKQLKEDYFKKIECFDSVEISGVEDRFNASLGTYHDLLKIIKDKDFLDNEENEDILEDIVLTLTLFEDREMIEERLKTYAHLFDDKVMKQLKRRRYTGWGRLSRKLINGIRDKQSGKTILDFLKSDGFANRNFMQLIHDDSLTFKEDIQKAQVSGQGDSLHEHIANLAGSPAIKKGILQTVKVVDELVKVMGRHKPENIVIEMARENQTTQKGQKNSRERMKRIEEGIKELGSQILKEHPVENTQLQNEKLYLYYLQNGRDMYVDQELDINRLSDYDVDHIVPQSFLKDDSIDNKVLTRSDKNRGKSDNVPSEEVVKKMKNYWRQLLNAKLITQRKFDNLTKAERGGLSELDKAGFIKRQLVETRQITKHVAQILDSRMNTKYDENDKLIREVKVITLKSKLVSDFRKDFQFYKVREINNYHHAHDAYLNAVVGTALIKKYPKLESEFVYGDYKVYDVRKMIAKSEQEIGKATAKYFFYSNIMNFFKTEITLANGEIRKRPLIETNGETGEIVWDKGRDFATVRKVLSMPQVNIVKKTEVQTGGFSKESILPKRNSDKLIARKKDWDPKKYGGFDSPTVAYSVLVVAKVEKGKSKKLKSVKELLGITIMERSSFEKNPIDFLEAKGYKEVKKDLIIKLPKYSLFELENGRKRMLASAGELQKGNELALPSKYVNFLYLASHYEKLKGSPEDNEQKQLFVEQHKHYLDEIIEQISEFSKRVILADANLDKVLSAYNKHRDKPIREQAENIIHLFTLTNLGAPAAFKYFDTTIDRKRYTSTKEVLDATLIHQSITGLYETRIDLSQLGGDSRADPKKKRKV

SEQ ID NO: 7825 - protein, 1386 aa, synthetic construct
  REGION 1..1386: note = Description of Artificial Sequence: Synthetic polypeptide
MAPKKKRKVDKKYSIGLDIGTNSVGWAVITDEYKVPSKKFKVLGNTDRHSIKKNLIGALLFDSGETAEATRLKRTARRRYTRRKNRICYLQEIFSNEMAKVDDSFFHRLEESFLVEEDKKHERHPIFGNIVDEVAYHEKYPTIYHLRKKLVDSTDKADLRLIYLALAHMIKFRGHFLIEGDLNPDNSDVDKLFIQLVQTYNQLFEENPINASGVDAKAILSARLSKSRRLENLIAQLPGEKKNGLFGNLIALSLGLTPNFKSNFDLAEDAKLQLSKDTYDDDLDNLLAQIGDQYADLFLAAKNLSDAILLSDILRVNTEITKAPLSASMIKRYDEHHQDLTLLKALVRQQLPEKYKEIFFDQSKNGYAGYIDGGASQEEFYKFIKPILEKMDGTEELLVKLNREDLLRKQRTFDNGSIPHQIHLGELHAILRRQEDFYPFLKDNREKIEKILTFRIPYYVGPLARGNSRFAWMTRKSEETITPWNFEEVVDKGASAQSFIERMTNFDKNLPNEKVLPKHSLLYEYFTVYNELTKVKYVTEGMRKPAFLSGEQKKAIVDLLFKTNRKVTVKQLKEDYFKKIECFDSVEISGVEDRFNASLGTYHDLLKIIKDKDFLDNEENEDILEDIVLTLTLFEDREMIEERLKTYAHLFDDKVMKQLKRRRYTGWGRLSRKLINGIRDKQSGKTILDFLKSDGFANRNFMQLIHDDSLTFKEDIQKAQVSGQGDSLHEHIANLAGSPAIKKGILQTVKVVDELVKVMGRHKPENIVIEMARENQTTQKGQKNSRERMKRIEEGIKELGSQILKEHPVENTQLQNEKLYLYYLQNGRDMYVDQELDINRLSDYDVDHIVPQSFLKDDSIDNKVLTRSDKNRGKSDNVPSEEVVKKMKNYWRQLLNAKLITQRKFDNLTKAERGGLSELDKAGFIKRQLVETRQITKHVAQILDSRMNTKYDENDKLIREVKVITLKSKLVSDFRKDFQFYKVREINNYHHAHDAYLNAVVGTALIKKYPKLESEFVYGDYKVYDVRKMIAKSEQEIGKATAKYFFYSNIMNFFKTEITLANGEIRKRPLIETNGETGEIVWDKGRDFATVRKVLSMPQVNIVKKTEVQTGGFSKESILPKRNSDKLIARKKDWDPKKYGGFDSPTVAYSVLVVAKVEKGKSKKLKSVKELLGITIMERSSFEKNPIDFLEAKGYKEVKKDLIIKLPKYSLFELENGRKRMLASAGELQKGNELALPSKYVNFLYLASHYEKLKGSPEDNEQKQLFVEQHKHYLDEIIEQISEFSKRVILADANLDKVLSAYNKHRDKPIREQAENIIHLFTLTNLGAPAAFKYFDTTIDRKRYTSTKEVLDATLIHQSITGLYETRIDLSQLGGDSRADHHHHHH

SEQ ID NO: 7826 - protein, 1389 aa, synthetic construct
  REGION 1..1389: note = Description of Artificial Sequence: Synthetic polypeptide
MAHHHHHHGGSDKKYSIGLDIGTNSVGWAVITDEYKVPSKKFKVLGNTDRHSIKKNLIGALLFDSGETAEATRLKRTARRRYTRRKNRICYLQEIFSNEMAKVDDSFFHRLEESFLVEEDKKHERHPIFGNIVDEVAYHEKYPTIYHLRKKLVDSTDKADLRLIYLALAHMIKFRGHFLIEGDLNPDNSDVDKLFIQLVQTYNQLFEENPINASGVDAKAILSARLSKSRRLENLIAQLPGEKKNGLFGNLIALSLGLTPNFKSNFDLAEDAKLQLSKDTYDDDLDNLLAQIGDQYADLFLAAKNLSDAILLSDILRVNTEITKAPLSASMIKRYDEHHQDLTLLKALVRQQLPEKYKEIFFDQSKNGYAGYIDGGASQEEFYKFIKPILEKMDGTEELLVKLNREDLLRKQRTFDNGSIPHQIHLGELHAILRRQEDFYPFLKDNREKIEKILTFRIPYYVGPLARGNSRFAWMTRKSEETITPWNFEEVVDKGASAQSFIERMTNFDKNLPNEKVLPKHSLLYEYFTVYNELTKVKYVTEGMRKPAFLSGEQKKAIVDLLFKTNRKVTVKQLKEDYFKKIECFDSVEISGVEDRFNASLGTYHDLLKIIKDKDFLDNEENEDILEDIVLTLTLFEDREMIEERLKTYAHLFDDKVMKQLKRRRYTGWGRLSRKLINGIRDKQSGKTILDFLKSDGFANRNFMQLIHDDSLTFKEDIQKAQVSGQGDSLHEHIANLAGSPAIKKGILQTVKVVDELVKVMGRHKPENIVIEMARENQTTQKGQKNSRERMKRIEEGIKELGSQILKEHPVENTQLQNEKLYLYYLQNGRDMYVDQELDINRLSDYDVDHIVPQSFLKDDSIDNKVLTRSDKNRGKSDNVPSEEVVKKMKNYWRQLLNAKLITQRKFDNLTKAERGGLSELDKAGFIKRQLVETRQITKHVAQILDSRMNTKYDENDKLIREVKVITLKSKLVSDFRKDFQFYKVREINNYHHAHDAYLNAVVGTALIKKYPKLESEFVYGDYKVYDVRKMIAKSEQEIGKATAKYFFYSNIMNFFKTEITLANGEIRKRPLIETNGETGEIVWDKGRDFATVRKVLSMPQVNIVKKTEVQTGGFSKESILPKRNSDKLIARKKDWDPKKYGGFDSPTVAYSVLVVAKVEKGKSKKLKSVKELLGITIMERSSFEKNPIDFLEAKGYKEVKKDLIIKLPKYSLFELENGRKRMLASAGELQKGNELALPSKYVNFLYLASHYEKLKGSPEDNEQKQLFVEQHKHYLDEIIEQISEFSKRVILADANLDKVLSAYNKHRDKPIREQAENIIHLFTLTNLGAPAAFKYFDTTIDRKRYTSTKEVLDATLIHQSITGLYETRIDLSQLGGDSRADPKKKRKV

SEQ ID NO: 7827 - protein, 1399 aa, synthetic construct; identical to SEQ ID NO: 7823
  REGION 1..1399: note = Description of Artificial Sequence: Synthetic polypeptide

SEQ ID NO: 7828 - protein, 1393 aa, synthetic construct
  REGION 1..1393: note = Description of Artificial Sequence: Synthetic polypeptide
MAPKKKRKVDKKYSIGLDIGTNSVGWAVITDEYKVPSKKFKVLGNTDRHSIKKNLIGALLFDSGETAEATRLKRTARRRYTRRKNRICYLQEIFSNEMAKVDDSFFHRLEESFLVEEDKKHERHPIFGNIVDEVAYHEKYPTIYHLRKKLVDSTDKADLRLIYLALAHMIKFRGHFLIEGDLNPDNSDVDKLFIQLVQTYNQLFEENPINASGVDAKAILSARLSKSRRLENLIAQLPGEKKNGLFGNLIALSLGLTPNFKSNFDLAEDAKLQLSKDTYDDDLDNLLAQIGDQYADLFLAAKNLSDAILLSDILRVNTEITKAPLSASMIKRYDEHHQDLTLLKALVRQQLPEKYKEIFFDQSKNGYAGYIDGGASQEEFYKFIKPILEKMDGTEELLVKLNREDLLRKQRTFDNGSIPHQIHLGELHAILRRQEDFYPFLKDNREKIEKILTFRIPYYVGPLARGNSRFAWMTRKSEETITPWNFEEVVDKGASAQSFIERMTNFDKNLPNEKVLPKHSLLYEYFTVYNELTKVKYVTEGMRKPAFLSGEQKKAIVDLLFKTNRKVTVKQLKEDYFKKIECFDSVEISGVEDRFNASLGTYHDLLKIIKDKDFLDNEENEDILEDIVLTLTLFEDREMIEERLKTYAHLFDDKVMKQLKRRRYTGWGRLSRKLINGIRDKQSGKTILDFLKSDGFANRNFMQLIHDDSLTFKEDIQKAQVSGQGDSLHEHIANLAGSPAIKKGILQTVKVVDELVKVMGRHKPENIVIEMARENQTTQKGQKNSRERMKRIEEGIKELGSQILKEHPVENTQLQNEKLYLYYLQNGRDMYVDQELDINRLSDYDVDHIVPQSFLKDDSIDNAVLTRSDKNRGKSDNVPSEEVVKKMKNYWRQLLNAKLITQRKFDNLTKAERGGLSELDKAGFIKRQLVETRQITKHVAQILDSRMNTKYDENDKLIREVKVITLKSKLVSDFRKDFQFYKVREINNYHHAHDAYLNAVVGTALIKKYPKLESEFVYGDYKVYDVRKMIAKSEQEIGKATAKYFFYSNIMNFFKTEITLANGEIRKRPLIETNGETGEIVWDKGRDFATVRKVLSMPQVNIVKKTEVQTGGFSKESILPKRNSDKLIARKKDWDPKKYGGFDSPTVAYSVLVVAKVEKGKSKKLKSVKELLGITIMERSSFEKNPIDFLEAKGYKEVKKDLIIKLPKYSLFELENGRKRMLASAGELQKGNELALPSKYVNFLYLASHYEKLKGSPEDNEQKQLFVEQHKHYLDEIIEQISEFSKRVILADANLDKVLSAYNKHRDKPIREQAENIIHLFTLTNLGAPAAFKYFDTTIDRKRYTSTKEVLDATLIHQSITGLYETRIDLSQLGGDSRADPKKKRKVHHHHHH

SEQ ID NO: 7829 - protein, 1393 aa, synthetic construct
  REGION 1..1393: note = Description of Artificial Sequence: Synthetic polypeptide
MAPKKKRKVDKKYSIGLDIGTNSVGWAVITDEYKVPSKKFKVLGNTDRHSIKKNLIGALLFDSGETAEATRLKRTARRRYTRRKNRICYLQEIFSNEMAKVDDSFFHRLEESFLVEEDKKHERHPIFGNIVDEVAYHEKYPTIYHLRKKLVDSTDKADLRLIYLALAHMIKFRGHFLIEGDLNPDNSDVDKLFIQLVQTYNQLFEENPINASGVDAKAILSARLSKSRRLENLIAQLPGEKKNGLFGNLIALSLGLTPNFKSNFDLAEDAKLQLSKDTYDDDLDNLLAQIGDQYADLFLAAKNLSDAILLSDILRVNTEITKAPLSASMIKRYDEHHQDLTLLKALVRQQLPEKYKEIFFDQSKNGYAGYIDGGASQEEFYKFIKPILEKMDGTEELLVKLNREDLLRKQRTFDNGSIPHQIHLGELHAILRRQEDFYPFLKDNREKIEKILTFRIPYYVGPLARGNSRFAWMTRKSEETITPWNFEEVVDKGASAQSFIERMTNFDKNLPNEKVLPKHSLLYEYFTVYNELTKVKYVTEGMRKPAFLSGEQKKAIVDLLFKTNRKVTVKQLKEDYFKKIECFDSVEISGVEDRFNASLGTYHDLLKIIKDKDFLDNEENEDILEDIVLTLTLFEDREMIEERLKTYAHLFDDKVMKQLKRRRYTGWGRLSRKLINGIRDKQSGKTILDFLKSDGFANRNFMQLIHDDSLTFKEDIQKAQVSGQGDSLHEHIANLAGSPAIKKGILQTVKVVDELVKVMGRHKPENIVIEMARENQTTQKGQKNSRERMKRIEEGIKELGSQILKEHPVENTQLQNEALYLYYLQNGRDMYVDQELDINRLSDYDVDHIVPQSFLKDDSIDNKVLTRSDKNRGKSDNVPSEEVVKKMKNYWRQLLNAKLITQRKFDNLTKAERGGLSELDKAGFIKRQLVETRQITKHVAQILDSRMNTKYDENDKLIREVKVITLKSKLVSDFRKDFQFYKVREINNYHHAHDAYLNAVVGTALIKKYPALESEFVYGDYKVYDVRKMIAKSEQEIGKATAKYFFYSNIMNFFKTEITLANGEIRKAPLIETNGETGEIVWDKGRDFATVRKVLSMPQVNIVKKTEVQTGGFSKESILPKRNSDKLIARKKDWDPKKYGGFDSPTVAYSVLVVAKVEKGKSKKLKSVKELLGITIMERSSFEKNPIDFLEAKGYKEVKKDLIIKLPKYSLFELENGRKRMLASAGELQKGNELALPSKYVNFLYLASHYEKLKGSPEDNEQKQLFVEQHKHYLDEIIEQISEFSKRVILADANLDKVLSAYNKHRDKPIREQAENIIHLFTLTNLGAPAAFKYFDTTIDRKRYTSTKEVLDATLIHQSITGLYETRIDLSQLGGDSRADPKKKRKVHHHHHH

SEQ ID NO: 7830 - protein, 1393 aa, synthetic construct
  REGION 1..1393: note = Description of Artificial Sequence: Synthetic polypeptide
MAPKKKRKVDKKYSIGLDIGTNSVGWAVITDEYKVPSKKFKVLGNTDRHSIKKNLIGALLFDSGETAEATRLKRTARRRYTRRKNRICYLQEIFSNEMAKVDDSFFHRLEESFLVEEDKKHERHPIFGNIVDEVAYHEKYPTIYHLRKKLVDSTDKADLRLIYLALAHMIKFRGHFLIEGDLNPDNSDVDKLFIQLVQTYNQLFEENPINASGVDAKAILSARLSKSRRLENLIAQLPGEKKNGLFGNLIALSLGLTPNFKSNFDLAEDAKLQLSKDTYDDDLDNLLAQIGDQYADLFLAAKNLSDAILLSDILRVNTEITKAPLSASMIKRYDEHHQDLTLLKALVRQQLPEKYKEIFFDQSKNGYAGYIDGGASQEEFYKFIKPILEKMDGTEELLVKLNREDLLRKQRTFDNGSIPHQIHLGELHAILRRQEDFYPFLKDNREKIEKILTFRIPYYVGPLARGNSRFAWMTRKSEETITPWNFEEVVDKGASAQSFIERMTNFDKNLPNEKVLPKHSLLYEYFTVYNELTKVKYVTEGMRKPAFLSGEQKKAIVDLLFKTNRKVTVKQLKEDYFKKIECFDSVEISGVEDRFNASLGTYHDLLKIIKDKDFLDNEENEDILEDIVLTLTLFEDREMIEERLKTYAHLFDDKVMKQLKRRRYTGWGRLSRKLINGIRDKQSGKTILDFLKSDGFANRNFMQLIHDDSLTFKEDIQKAQVSGQGDSLHEHIANLAGSPAIKKGILQTVKVVDELVKVMGRHKPENIVIEMARENQTTQKGQKNSRERMKRIEEGIKELGSQILKEHPVENTQLQNEKLYLYYLQNGRDMYVDQELDINRLSDYDVDHIVPQSFLADDSIDNKVLTRSDKNRGKSDNVPSEEVVKKMKNYWRQLLNAKLITQRKFDNLTKAERGGLSELDKAGFIKRQLVETRQITKHVAQILDSRMNTKYDENDKLIREVKVITLKSKLVSDFRKDFQFYKVREINNYHHAHDAYLNAVVGTALIKKYPALESEFVYGDYKVYDVRKMIAKSEQEIGKATAKYFFYSNIMNFFKTEITLANGEIRKAPLIETNGETGEIVWDKGRDFATVRKVLSMPQVNIVKKTEVQTGGFSKESILPKRNSDKLIARKKDWDPKKYGGFDSPTVAYSVLVVAKVEKGKSKKLKSVKELLGITIMERSSFEKNPIDFLEAKGYKEVKKDLIIKLPKYSLFELENGRKRMLASAGELQKGNELALPSKYVNFLYLASHYEKLKGSPEDNEQKQLFVEQHKHYLDEIIEQISEFSKRVILADANLDKVLSAYNKHRDKPIREQAENIIHLFTLTNLGAPAAFKYFDTTIDRKRYTSTKEVLDATLIHQSITGLYETRIDLSQLGGDSRADPKKKRKVHHHHHH

SEQ ID NO: 7831 - protein, 1393 aa, synthetic construct
  REGION 1..1393: note = Description of Artificial Sequence: Synthetic polypeptide
MAPKKKRKVDKKYSIGLDIGTNSVGWAVITDEYKVPSKKFKVLGNTDRHSIKKNLIGALLFDSGETAEATRLKRTARRRYTRRKNRICYLQEIFSNEMAKVDDSFFHRLEESFLVEEDKKHERHPIFGNIVDEVAYHEKYPTIYHLRKKLVDSTDKADLRLIYLALAHMIKFRGHFLIEGDLNPDNSDVDKLFIQLVQTYNQLFEENPINASGVDAKAILSARLSKSRRLENLIAQLPGEKKNGLFGNLIALSLGLTPNFKSNFDLAEDAKLQLSKDTYDDDLDNLLAQIGDQYADLFLAAKNLSDAILLSDILRVNTEITKAPLSASMIKRYDEHHQDLTLLKALVRQQLPEKYKEIFFDQSKNGYAGYIDGGASQEEFYKFIKPILEKMDGTEELLVKLNREDLLRKQRTFDNGSIPHQIHLGELHAILRRQEDFYPFLKDNREKIEKILTFRIPYYVGPLARGNSRFAWMTRKSEETITPWNFEEVVDKGASAQSFIERMTAFDKNLPNEKVLPKHSLLYEYFTVYNELTKVKYVTEGMRKPAFLSGEQKKAIVDLLFKTNRKVTVKQLKEDYFKKIECFDSVEISGVEDRFNASLGTYHDLLKIIKDKDFLDNEENEDILEDIVLTLTLFEDREMIEERLKTYAHLFDDKVMKQLKRRRYTGWGALSRKLINGIRDKQSGKTILDFLKSDGFANRNFMALIHDDSLTFKEDIQKAQVSGQGDSLHEHIANLAGSPAIKKGILQTVKVVDELVKVMGRHKPENIVIEMARENQTTQKGQKNSRERMKRIEEGIKELGSQILKEHPVENTQLQNEKLYLYYLQNGRDMYVDQELDINRLSDYDVDHIVPQSFLKDDSIDNKVLTRSDKNRGKSDNVPSEEVVKKMKNYWRQLLNAKLITQRKFDNLTKAERGGLSELDKAGFIKRQLVETRAITKHVAQILDSRMNTKYDENDKLIREVKVITLKSKLVSDFRKDFQFYKVREINNYHHAHDAYLNAVVGTALIKKYPKLESEFVYGDYKVYDVRKMIAKSEQEIGKATAKYFFYSNIMNFFKTEITLANGEIRKRPLIETNGETGEIVWDKGRDFATVRKVLSMPQVNIVKKTEVQTGGFSKESILPKRNSDKLIARKKDWDPKKYGGFDSPTVAYSVLVVAKVEKGKSKKLKSVKELLGITIMERSSFEKNPIDFLEAKGYKEVKKDLIIKLPKYSLFELENGRKRMLASAGELQKGNELALPSKYVNFLYLASHYEKLKGSPEDNEQKQLFVEQHKHYLDEIIEQISEFSKRVILADANLDKVLSAYNKHRDKPIREQAENIIHLFTLTNLGAPAAFKYFDTTIDRKRYTSTKEVLDATLIHQSITGLYETRIDLSQLGGDSRADPKKKRKVHHHHHH

SEQ ID NO: 7832 - skipped

SEQ ID NO: 7833 - RNA, 100 nt, synthetic construct
  misc_feature 1..100: note = Description of Artificial Sequence: Synthetic polynucleotide
  source 1..100: mol_type = other RNA
agagtctctcagctggtacagttttagagctagaaatagcaagttaaaataaggctagtccgttatcaacttgaaaaagtggcaccgagtcggtgctttt

SEQ ID NO: 7834 - RNA, 100 nt, synthetic construct; identical to SEQ ID NO: 7833
  misc_feature 1..100: note = Description of Artificial Sequence: Synthetic polynucleotide
  source 1..100: mol_type = other RNA

SEQ ID NO: 7835 - RNA, 100 nt, synthetic construct; identical to SEQ ID NO: 7833
  misc_feature 1..100: note = Description of Artificial Sequence: Synthetic polynucleotide
  source 1..100: mol_type = other RNA

SEQ ID NO: 7836 - RNA, 42 nt, synthetic construct
  misc_feature 1..42: note = Description of Artificial Sequence: Synthetic oligonucleotide
  source 1..42: mol_type = other RNA
agagtctctcagctggtacagttttagagctatgctgttttg

SEQ ID NO: 7837 - RNA, 42 nt, synthetic construct; identical to SEQ ID NO: 7836
  misc_feature 1..42: note = Description of Artificial Sequence: Synthetic oligonucleotide
  source 1..42: mol_type = other RNA

SEQ ID NO: 7838 - RNA, 100 nt, synthetic construct
  misc_feature 1..100: note = Description of Artificial Sequence: Synthetic polynucleotide
  source 1..100: mol_type = other RNA
ttcggaacccaatcactgacgttttagagctagaaatagcaagttaaaataaggctagtccgttatcaacttgaaaaagtggcaccgagtcggtgctttt

SEQ ID NO: 7839 - RNA, 100 nt, synthetic construct; identical to SEQ ID NO: 7838
  misc_feature 1..100: note = Description of Artificial Sequence: Synthetic polynucleotide
  source 1..100: mol_type = other RNA

SEQ ID NO: 7840 - RNA, 100 nt, synthetic construct; identical to SEQ ID NO: 7838
  misc_feature 1..100: note = Description of Artificial Sequence: Synthetic polynucleotide
  source 1..100: mol_type = other RNA

SEQ ID NO: 7841 - RNA, 42 nt, synthetic construct
  misc_feature 1..42: note = Description of Artificial Sequence: Synthetic oligonucleotide
  source 1..42: mol_type = other RNA
ttcggaacccaatcactgacgttttagagctatgctgttttg

SEQ ID NO: 7842 - RNA, 42 nt, synthetic construct; identical to SEQ ID NO: 7841
  misc_feature 1..42: note = Description of Artificial Sequence: Synthetic oligonucleotide
  source 1..42: mol_type = other RNA

SEQ ID NO: 7843 - RNA, 100 nt, synthetic construct
  misc_feature 1..100: note = Description of Artificial Sequence: Synthetic polynucleotide
  source 1..100: mol_type = other RNA
tggctcaaacacagcgacctgttttagagctagaaatagcaagttaaaataaggctagtccgttatcaacttgaaaaagtggcaccgagtcggtgctttt

SEQ ID NO: 7844 - RNA, 100 nt, synthetic construct; identical to SEQ ID NO: 7843
  misc_feature 1..100: note = Description of Artificial Sequence: Synthetic polynucleotide
  source 1..100: mol_type = other RNA

SEQ ID NO: 7845 - RNA, 100 nt, synthetic construct; identical to SEQ ID NO: 7843
  misc_feature 1..100: note = Description of Artificial Sequence: Synthetic polynucleotide
  source 1..100: mol_type = other RNA

SEQ ID NO: 7846 - RNA, 42 nt, synthetic construct
  misc_feature 1..42: note = Description of Artificial Sequence: Synthetic oligonucleotide
  source 1..42: mol_type = other RNA
tggctcaaacacagcgacctgttttagagctatgctgttttg

SEQ ID NO: 7847 - RNA, 42 nt, synthetic construct; identical to SEQ ID NO: 7846
  misc_feature 1..42: note = Description of Artificial Sequence: Synthetic oligonucleotide
  source 1..42: mol_type = other RNA

SEQ ID NO: 7848 - RNA, 100 nt, synthetic construct
  misc_feature 1..100: note = Description of Artificial Sequence: Synthetic polynucleotide
  source 1..100: mol_type = other RNA
tccctagcaagatctcataggttttagagctagaaatagcaagttaaaataaggctagtccgttatcaacttgaaaaagtggcaccgagtcggtgctttt

SEQ ID NO: 7849 - RNA, 100 nt, synthetic construct; identical to SEQ ID NO: 7848
  misc_feature 1..100: note = Description of Artificial Sequence: Synthetic polynucleotide
  source 1..100: mol_type = other RNA

SEQ ID NO: 7850 - RNA, 100 nt, synthetic construct; identical to SEQ ID NO: 7848
  misc_feature 1..100: note = Description of Artificial Sequence: Synthetic polynucleotide
  source 1..100: mol_type = other RNA

SEQ ID NO: 7851 - RNA, 42 nt, synthetic construct
  misc_feature 1..42: note = Description of Artificial Sequence: Synthetic oligonucleotide
  source 1..42: mol_type = other RNA
tccctagcaagatctcataggttttagagctatgctgttttg

SEQ ID NO: 7852 - RNA, 42 nt, synthetic construct; identical to SEQ ID NO: 7851
  misc_feature 1..42: note = Description of Artificial Sequence: Synthetic oligonucleotide
  source 1..42: mol_type = other RNA

SEQ ID NO: 7853 - RNA, 100 nt, synthetic construct
  misc_feature 1..100: note = Description of Artificial Sequence: Synthetic polynucleotide
  source 1..100: mol_type = other RNA
ggccacggagcgagacatctgttttagagctagaaatagcaagttaaaataaggctagtccgttatcaacttgaaaaagtggcaccgagtcggtgctttt

SEQ ID NO: 7854 - RNA, 100 nt, synthetic construct; identical to SEQ ID NO: 7853
  misc_feature 1..100: note = Description of Artificial Sequence: Synthetic polynucleotide
  source 1..100: mol_type = other RNA

SEQ ID NO: 7855 - RNA, 100 nt, synthetic construct; identical to SEQ ID NO: 7853
  misc_feature 1..100: note = Description of Artificial Sequence: Synthetic polynucleotide
  source 1..100: mol_type = other RNA

SEQ ID NO: 7856 - RNA, 42 nt, synthetic construct
  misc_feature 1..42: note = Description of Artificial Sequence: Synthetic oligonucleotide
  source 1..42: mol_type = other RNA
ggccacggagcgagacatctgttttagagctatgctgttttg

SEQ ID NO: 7857 - RNA, 42 nt, synthetic construct; identical to SEQ ID NO: 7856
  misc_feature 1..42: note = Description of Artificial Sequence: Synthetic oligonucleotide
  source 1..42: mol_type = other RNA

SEQ ID NO: 7858 - RNA, 100 nt, synthetic construct
  misc_feature 1..100: note = Description of Artificial Sequence: Synthetic polynucleotide
  source 1..100: mol_type = other RNA
gagtagcgcgagcacagctagttttagagctagaaatagcaagttaaaataaggctagtccgttatcaacttgaaaaagtggcaccgagtcggtgctttt

SEQ ID NO: 7859 - RNA, 99 nt, synthetic construct
  misc_feature 1..99: note = Description of Artificial Sequence: Synthetic oligonucleotide
  source 1..99: mol_type = other RNA
gatagcgcgagcacagctagttttagagctagaaatagcaagttaaaataaggctagtccgttatcaacttgaaaaagtggcaccgagtcggtgctttt

SEQ ID NO: 7860 - RNA, 99 nt, synthetic construct; identical to SEQ ID NO: 7859
  misc_feature 1..99: note = Description of Artificial Sequence: Synthetic oligonucleotide
  source 1..99: mol_type = other RNA

SEQ ID NO: 7861 - RNA, 42 nt, synthetic construct
  misc_feature 1..42: note = Description of Artificial Sequence: Synthetic oligonucleotide
  source 1..42: mol_type = other RNA
gagtagcgcgagcacagctagttttagagctatgctgttttg

SEQ ID NO: 7862 - RNA, 41 nt, synthetic construct
  misc_feature 1..41: note = Description of Artificial Sequence: Synthetic oligonucleotide
  source 1..41: mol_type = other RNA
gatagcgcgagcacagctagttttagagctatgctgttttg

SEQ ID NO: 7863 - RNA, 100 nt, synthetic construct
  misc_feature 1..100: note = Description of Artificial Sequence: Synthetic polynucleotide
  source 1..100: mol_type = other RNA
caagcgcggccagacctgcggttttagagctagaaatagcaagttaaaataaggctagtccgttatcaacttgaaaaagtggcaccgagtcggtgctttt

SEQ ID NO: 7864 - RNA, 100 nt, synthetic construct; identical to SEQ ID NO: 7863
  misc_feature 1..100: note = Description of Artificial Sequence: Synthetic polynucleotide
  source 1..100: mol_type = other RNA

SEQ ID NO: 7865 - RNA, 100 nt, synthetic construct; identical to SEQ ID NO: 7863
  misc_feature 1..100: note = Description of Artificial Sequence: Synthetic polynucleotide
  source 1..100: mol_type = other RNA

SEQ ID NO: 7866 - RNA, 42 nt, synthetic construct
  misc_feature 1..42: note = Description of Artificial Sequence: Synthetic oligonucleotide
  source 1..42: mol_type = other RNA
caagcgcggccagacctgcggttttagagctatgctgttttg

SEQ ID NO: 7867 - RNA, 42 nt, synthetic construct; identical to SEQ ID NO: 7866
  misc_feature 1..42: note = Description of Artificial Sequence: Synthetic oligonucleotide
  source 1..42: mol_type = other RNA

SEQ ID NO: 7868 - RNA, 100 nt, synthetic construct
  misc_feature 1..100: note = Description of Artificial Sequence: Synthetic polynucleotide
  source 1..100: mol_type = other RNA
ccgctgggcccccgactcacgttttagagctagaaatagcaagttaaaataaggctagtccgttatcaacttgaaaaagtggcaccgagtcggtgctttt

SEQ ID NO: 7869 - RNA, 100 nt, synthetic construct; identical to SEQ ID NO: 7868
  misc_feature 1..100: note = Description of Artificial Sequence: Synthetic polynucleotide
  source 1..100: mol_type = other RNA

SEQ ID NO: 7870 - RNA, 100 nt, synthetic construct; identical to SEQ ID NO: 7868
  misc_feature 1..100: note = Description of Artificial Sequence: Synthetic polynucleotide
  source 1..100: mol_type = other RNA

SEQ ID NO: 7871 - RNA, 42 nt, synthetic construct
  misc_feature 1..42: note = Description of Artificial Sequence: Synthetic oligonucleotide
  source 1..42: mol_type = other RNA
ccgctgggcccccgactcacgttttagagctatgctgttttg

SEQ ID NO: 7872 - RNA, 42 nt, synthetic construct; identical to SEQ ID NO: 7871
  misc_feature 1..42: note = Description of Artificial Sequence: Synthetic oligonucleotide
  source 1..42: mol_type = other RNA

SEQ ID NO: 7873-7882 - skipped (10 entries)

SEQ ID NO: 7883 - protein, 242 aa, synthetic construct
  REGION 1..242: note = Description of Artificial Sequence: Synthetic polypeptide
EIVMTQSPATLSLSPGERATLSCRASQDISKYLNWYQQKPGQAPRLLIYHTSRLHSGIPARFSGSGSGTDYTLTISSLQPEDFAVYFCQQGNTLPYTFGQGTKLEIKGGGGSGGGGSGGGGSQVQLQESGPGLVKPSETLSLTCTVSGVSLPDYGVSWIRQPPGKGLEWIGVIWGSETTYYSSSLKSRVTISKDNSKNQVSLKLSSVTAADTAVYYCAKHYYYGGSYAMDYWGQGTLVTVSS

SEQ ID NO: 7884 - protein, 242 aa, synthetic construct
  REGION 1..242: note = Description of Artificial Sequence: Synthetic polypeptide
EIVMTQSPATLSLSPGERATLSCRASQDISKYLNWYQQKPGQAPRLLIYHTSRLHSGIPARFSGSGSGTDYTLTISSLQPEDFAVYFCQQGNTLPYTFGQGTKLEIKGGGGSGGGGSGGGGSQVQLQESGPGLVKPSETLSLTCTVSGVSLPDYGVSWIRQPPGKGLEWIGVIWGSETTYYQSSLKSRVTISKDNSKNQVSLKLSSVTAADTAVYYCAKHYYYGGSYAMDYWGQGTLVTVSS

SEQ ID NO: 7885 - protein, 242 aa, synthetic construct
  REGION 1..242: note = Description of Artificial Sequence: Synthetic polypeptide
QVQLQESGPGLVKPSETLSLTCTVSGVSLPDYGVSWIRQPPGKGLEWIGVIWGSETTYYSSSLKSRVTISKDNSKNQVSLKLSSVTAADTAVYYCAKHYYYGGSYAMDYWGQGTLVTVSSGGGGSGGGGSGGGGSEIVMTQSPATLSLSPGERATLSCRASQDISKYLNWYQQKPGQAPRLLIYHTSRLHSGIPARFSGSGSGTDYTLTISSLQPEDFAVYFCQQGNTLPYTFGQGTKLEIK

SEQ ID NO: 7886 - protein, 242 aa, synthetic construct
  REGION 1..242: note = Description of Artificial Sequence: Synthetic polypeptide
QVQLQESGPGLVKPSETLSLTCTVSGVSLPDYGVSWIRQPPGKGLEWIGVIWGSETTYYQSSLKSRVTISKDNSKNQVSLKLSSVTAADTAVYYCAKHYYYGGSYAMDYWGQGTLVTVSSGGGGSGGGGSGGGGSEIVMTQSPATLSLSPGERATLSCRASQDISKYLNWYQQKPGQAPRLLIYHTSRLHSGIPARFSGSGSGTDYTLTISSLQPEDFAVYFCQQGNTLPYTFGQGTKLEIK

SEQ ID NO: 7887 - protein, 247 aa, synthetic construct
  REGION 1..247: note = Description of Artificial Sequence: Synthetic polypeptide
EIVMTQSPATLSLSPGERATLSCRASQDISKYLNWYQQKPGQAPRLLIYHTSRLHSGIPARFSGSGSGTDYTLTISSLQPEDFAVYFCQQGNTLPYTFGQGTKLEIKGGGGSGGGGSGGGGSGGGGSQVQLQESGPGLVKPSETLSLTCTVSGVSLPDYGVSWIRQPPGKGLEWIGVIWGSETTYYSSSLKSRVTISKDNSKNQVSLKLSSVTAADTAVYYCAKHYYYGGSYAMDYWGQGTLVTVSS

SEQ ID NO: 7888 - protein, 247 aa, synthetic construct
  REGION 1..247: note = Description of Artificial Sequence: Synthetic polypeptide
EIVMTQSPATLSLSPGERATLSCRASQDISKYLNWYQQKPGQAPRLLIYHTSRLHSGIPARFSGSGSGTDYTLTISSLQPEDFAVYFCQQGNTLPYTFGQGTKLEIKGGGGSGGGGSGGGGSGGGGSQVQLQESGPGLVKPSETLSLTCTVSGVSLPDYGVSWIRQPPGKGLEWIGVIWGSETTYYQSSLKSRVTISKDNSKNQVSLKLSSVTAADTAVYYCAKHYYYGGSYAMDYWGQGTLVTVSS

SEQ ID NO: 7889 - protein, 247 aa, synthetic construct
  REGION 1..247: note = Description of Artificial Sequence: Synthetic polypeptide
QVQLQESGPGLVKPSETLSLTCTVSGVSLPDYGVSWIRQPPGKGLEWIGVIWGSETTYYSSSLKSRVTISKDNSKNQVSLKLSSVTAADTAVYYCAKHYYYGGSYAMDYWGQGTLVTVSSGGGGSGGGGSGGGGSGGGGSEIVMTQSPATLSLSPGERATLSCRASQDISKYLNWYQQKPGQAPRLLIYHTSRLHSGIPARFSGSGSGTDYTLTISSLQPEDFAVYFCQQGNTLPYTFGQGTKLEIK

SEQ ID NO: 7890 - protein, 247 aa, synthetic construct
  REGION 1..247: note = Description of Artificial Sequence: Synthetic polypeptide
QVQLQESGPGLVKPSETLSLTCTVSGVSLPDYGVSWIRQPPGKGLEWIGVIWGSETTYYQSSLKSRVTISKDNSKNQVSLKLSSVTAADTAVYYCAKHYYYGGSYAMDYWGQGTLVTVSSGGGGSGGGGSGGGGSGGGGSEIVMTQSPATLSLSPGERATLSCRASQDISKYLNWYQQKPGQAPRLLIYHTSRLHSGIPARFSGSGSGTDYTLTISSLQPEDFAVYFCQQGNTLPYTFGQGTKLEIK

SEQ ID NO: 7891 - protein, 247 aa, synthetic construct
  REGION 1..247: note = Description of Artificial Sequence: Synthetic polypeptide
EIVMTQSPATLSLSPGERATLSCRASQDISKYLNWYQQKPGQAPRLLIYHTSRLHSGIPARFSGSGSGTDYTLTISSLQPEDFAVYFCQQGNTLPYTFGQGTKLEIKGGGGSGGGGSGGGGSGGGGSQVQLQESGPGLVKPSETLSLTCTVSGVSLPDYGVSWIRQPPGKGLEWIGVIWGSETTYYNSSLKSRVTISKDNSKNQVSLKLSSVTAADTAVYYCAKHYYYGGSYAMDYWGQGTLVTVSS

SEQ ID NO: 7892 - protein, 247 aa, synthetic construct
  REGION 1..247: note = Description of Artificial Sequence: Synthetic polypeptide
QVQLQESGPGLVKPSETLSLTCTVSGVSLPDYGVSWIRQPPGKGLEWIGVIWGSETTYYNSSLKSRVTISKDNSKNQVSLKLSSVTAADTAVYYCAKHYYYGGSYAMDYWGQGTLVTVSSGGGGSGGGGSGGGGSGGGGSEIVMTQSPATLSLSPGERATLSCRASQDISKYLNWYQQKPGQAPRLLIYHTSRLHSGIPARFSGSGSGTDYTLTISSLQPEDFAVYFCQQGNTLPYTFGQGTKLEIK

SEQ ID NO: 7893 - protein, 242 aa, synthetic construct
  REGION 1..242: note = Description of Artificial Sequence: Synthetic polypeptide
EIVMTQSPATLSLSPGERATLSCRASQDISKYLNWYQQKPGQAPRLLIYHTSRLHSGIPARFSGSGSGTDYTLTISSLQPEDFAVYFCQQGNTLPYTFGQGTKLEIKGGGGSGGGGSGGGGSQVQLQESGPGLVKPSETLSLTCTVSGVSLPDYGVSWIRQPPGKGLEWIGVIWGSETTYYNSSLKSRVTISKDNSKNQVSLKLSSVTAADTAVYYCAKHYYYGGSYAMDYWGQGTLVTVSS

SEQ ID NO: 7894 - protein, 242 aa, synthetic construct
  REGION 1..242: note = Description of Artificial Sequence: Synthetic polypeptide
QVQLQESGPGLVKPSETLSLTCTVSGVSLPDYGVSWIRQPPGKGLEWIGVIWGSETTYYNSSLKSRVTISKDNSKNQVSLKLSSVTAADTAVYYCAKHYYYGGSYAMDYWGQGTLVTVSSGGGGSGGGGSGGGGSEIVMTQSPATLSLSPGERATLSCRASQDISKYLNWYQQKPGQAPRLLIYHTSRLHSGIPARFSGSGSGTDYTLTISSLQPEDFAVYFCQQGNTLPYTFGQGTKLEIK

SEQ ID NO: 7895 - protein, 242 aa, synthetic construct
  REGION 1..242: note = Description of Artificial Sequence: Synthetic polypeptide
DIQMTQTTSSLSASLGDRVTISCRASQDISKYLNWYQQKPDGTVKLLIYHTSRLHSGVPSRFSGSGSGTDYSLTISNLEQEDIATYFCQQGNTLPYTFGGGTKLEITGGGGSGGGGSGGGGSEVKLQESGPGLVAPSQSLSVTCTVSGVSLPDYGVSWIRQPPRKGLEWLGVIWGSETTYYNSALKSRLTIIKDNSKSQVFLKMNSLQTDDTAIYYCAKHYYYGGSYAMDYWGQGTSVTVSS

SEQ ID NO: 7896 - protein, 119 aa, synthetic construct
  REGION 1..119: note = Description of Artificial Sequence: Synthetic polypeptide
QVQLLESGAELVRPGSSVKISCKASGYAFSSYWMNWVKQRPGQGLEWIGQIYPGDGDTNYNGKFKGQATLTADKSSSTAYMQLSGLTSEDSAVYSCARKTISSVVDFYFDYWGQGTTVT

SEQ ID NO: 7897 - protein, 111 aa, synthetic construct
  REGION 1..111: note = Description of Artificial Sequence: Synthetic polypeptide
ELVLTQSPKFMSTSVGDRVSVTCKASQNVGTNVAWYQQKPGQSPKPLIYSATYRNSGVPDRFTGSGSGTDFTLTITNVQSKDLADYFYFCQYNRYPYTSGGGTKLEIKRRS

SEQ ID NO: 7898 - protein, 248 aa, synthetic construct
  REGION 1..248: note = Description of Artificial Sequence: Synthetic polypeptide
QVQLLESGAELVRPGSSVKISCKASGYAFSSYWMNWVKQRPGQGLEWIGQIYPGDGDTNYNGKFKGQATLTADKSSSTAYMQLSGLTSEDSAVYSCARKTISSVVDFYFDYWGQGTTVTGSTSGSGKPGSGEGSTKGELVLTQSPKFMSTSVGDRVSVTCKASQNVGTNVAWYQQKPGQSPKPLIYSATYRNSGVPDRFTGSGSGTDFTLTITNVQSKDLADYFYFCQYNRYPYTSGGGTKLEIKRRS

SEQ ID NO: 7899 - protein, 10 aa, synthetic construct
  REGION 1..10: note = Description of Artificial Sequence: Synthetic peptide
GVSLPDYGVS

SEQ ID NO: 7900 - protein, 16 aa, synthetic construct
  REGION 1..16: note = Description of Artificial Sequence: Synthetic peptide
VIWGSETTYYNSALKS

SEQ ID NO: 7901 - protein, 16 aa, synthetic construct
  REGION 1..16: note = Description of Artificial Sequence: Synthetic peptide
VIWGSETTYYSSSLKS

SEQ ID NO: 7902 - protein, 16 aa, synthetic construct
  REGION 1..16: note = Description of Artificial Sequence: Synthetic peptide
VIWGSETTYYQSSLKS

SEQ ID NO: 7903 - protein, 16 aa, synthetic construct
  REGION 1..16: note = Description of Artificial Sequence: Synthetic peptide
VIWGSETTYYNSSLKS

SEQ ID NO: 7904 - protein, 12 aa, synthetic construct
  REGION 1..12: note = Description of Artificial Sequence: Synthetic peptide
HYYYGGSYAMDY

SEQ ID NO: 7905 - protein, 11 aa, synthetic construct
  REGION 1..11: note = Description of Artificial Sequence: Synthetic peptide
RASQDISKYLN

SEQ ID NO: 7906 - protein, 7 aa, synthetic construct
  REGION 1..7: note = Description of Artificial Sequence: Synthetic peptide
HTSRLHS

SEQ ID NO: 7907 - protein, 9 aa, synthetic construct
  REGION 1..9: note = Description of Artificial Sequence: Synthetic peptide
QQGNTLPYT

SEQ ID NO: 7908 - protein, 486 aa, synthetic construct
  REGION 1..486: note = Description of Artificial Sequence: Synthetic polypeptide
MALPVTALLLPLALLLHAARPEIVMTQSPATLSLSPGERATLSCRASQDISKYLNWYQQKPGQAPRLLIYHTSRLHSGIPARFSGSGSGTDYTLTISSLQPEDFAVYFCQQGNTLPYTFGQGTKLEIKGGGGSGGGGSGGGGSQVQLQESGPGLVKPSETLSLTCTVSGVSLPDYGVSWIRQPPGKGLEWIGVIWGSETTYYSSSLKSRVTISKDNSKNQVSLKLSSVTAADTAVYYCAKHYYYGGSYAMDYWGQGTLVTVSSTTTPAPRPPTPAPTIASQPLSLRPEACRPAAGGAVHTRGLDFACDIYIWAPLAGTCGVLLLSLVITLYCKRGRKKLLYIFKQPFMRPVQTTQEEDGCSCRFPEEEEGGCELRVKFSRSADAPAYKQGQNQLYNELNLGRREEYDVLDKRRGRDPEMGGKPRRKNPQEGLYNELQKDKMAEAYSEIGMKGERRRGKGHDGLYQGLSTATKDTYDALHMQALPPR

SEQ ID NO: 7909 - protein, 486 aa, synthetic construct
  REGION 1..486: note = Description of Artificial Sequence: Synthetic polypeptide
MALPVTALLLPLALLLHAARPEIVMTQSPATLSLSPGERATLSCRASQDISKYLNWYQQKPGQAPRLLIYHTSRLHSGIPARFSGSGSGTDYTLTISSLQPEDFAVYFCQQGNTLPYTFGQGTKLEIKGGGGSGGGGSGGGGSQVQLQESGPGLVKPSETLSLTCTVSGVSLPDYGVSWIRQPPGKGLEWIGVIWGSETTYYQSSLKSRVTISKDNSKNQVSLKLSSVTAADTAVYYCAKHYYYGGSYAMDYWGQGTLVTVSSTTTPAPRPPTPAPTIASQPLSLRPEACRPAAGGAVHTRGLDFACDIYIWAPLAGTCGVLLLSLVITLYCKRGRKKLLYIFKQPFMRPVQTTQEEDGCSCRFPEEEEGGCELRVKFSRSADAPAYKQGQNQLYNELNLGRREEYDVLDKRRGRDPEMGGKPRRKNPQEGLYNELQKDKMAEAYSEIGMKGERRRGKGHDGLYQGLSTATKDTYDALHMQALPPR

SEQ ID NO: 7910 - protein, 486 aa, synthetic construct
  REGION 1..486: note = Description of Artificial Sequence: Synthetic polypeptide
MALPVTALLLPLALLLHAARPQVQLQESGPGLVKPSETLSLTCTVSGVSLPDYGVSWIRQPPGKGLEWIGVIWGSETTYYSSSLKSRVTISKDNSKNQVSLKLSSVTAADTAVYYCAKHYYYGGSYAMDYWGQGTLVTVSSGGGGSGGGGSGGGGSEIVMTQSPATLSLSPGERATLSCRASQDISKYLNWYQQKPGQAPRLLIYHTSRLHSGIPARFSGSGSGTDYTLTISSLQPEDFAVYFCQQGNTLPYTFGQGTKLEIKTTTPAPRPPTPAPTIASQPLSLRPEACRPAAGGAVHTRGLDFACDIYIWAPLAGTCGVLLLSLVITLYCKRGRKKLLYIFKQPFMRPVQTTQEEDGCSCRFPEEEEGGCELRVKFSRSADAPAYKQGQNQLYNELNLGRREEYDVLDKRRGRDPEMGGKPRRKNPQEGLYNELQKDKMAEAYSEIGMKGERRRGKGHDGLYQGLSTATKDTYDALHMQALPPR

SEQ ID NO: 7911 - protein, 486 aa, synthetic construct
  REGION 1..486: note = Description of Artificial Sequence: Synthetic polypeptide
MALPVTALLLPLALLLHAARPQVQLQESGPGLVKPSETLSLTCTVSGVSLPDYGVSWIRQPPGKGLEWIGVIWGSETTYYQSSLKSRVTISKDNSKNQVSLKLSSVTAADTAVYYCAKHYYYGGSYAMDYWGQGTLVTVSSGGGGSGGGGSGGGGSEIVMTQSPATLSLSPGERATLSCRASQDISKYLNWYQQKPGQAPRLLIYHTSRLHSGIPARFSGSGSGTDYTLTISSLQPEDFAVYFCQQGNTLPYTFGQGTKLEIKTTTPAPRPPTPAPTIASQPLSLRPEACRPAAGGAVHTRGLDFACDIYIWAPLAGTCGVLLLSLVITLYCKRGRKKLLYIFKQPFMRPVQTTQEEDGCSCRFPEEEEGGCELRVKFSRSADAPAYKQGQNQLYNELNLGRREEYDVLDKRRGRDPEMGGKPRRKNPQEGLYNELQKDKMAEAYSEIGMKGERRRGKGHDGLYQGLSTATKDTYDALHMQALPPR

SEQ ID NO: 7912 - protein, 491 aa, synthetic construct
  REGION 1..491: note = Description of Artificial Sequence: Synthetic polypeptide
MALPVTALLLPLALLLHAARPEIVMTQSPATLSLSPGERATLSCRASQDISKYLNWYQQKPGQAPRLLIYHTSRLHSGIPARFSGSGSGTDYTLTISSLQPEDFAVYFCQQGNTLPYTFGQGTKLEIKGGGGSGGGGSGGGGSGGGGSQVQLQESGPGLVKPSETLSLTCTVSGVSLPDYGVSWIRQPPGKGLEWIGVIWGSETTYYSSSLKSRVTISKDNSKNQVSLKLSSVTAADTAVYYCAKHYYYGGSYAMDYWGQGTLVTVSSTTTPAPRPPTPAPTIASQPLSLRPEACRPAAGGAVHTRGLDFACDIYIWAPLAGTCGVLLLSLVITLYCKRGRKKLLYIFKQPFMRPVQTTQEEDGCSCRFPEEEEGGCELRVKFSRSADAPAYKQGQNQLYNELNLGRREEYDVLDKRRGRDPEMGGKPRRKNPQEGLYNELQKDKMAEAYSEIGMKGERRRGKGHDGLYQGLSTATKDTYDALHMQALPPR

SEQ ID NO: 7913 - protein, 491 aa, synthetic construct
  REGION 1..491: note = Description of Artificial Sequence: Synthetic polypeptide
MALPVTALLLPLALLLHAARPEIVMTQSPATLSLSPGERATLSCRASQDISKYLNWYQQKPGQAPRLLIYHTSRLHSGIPARFSGSGSGTDYTLTISSLQPEDFAVYFCQQGNTLPYTFGQGTKLEIKGGGGSGGGGSGGGGSGGGGSQVQLQESGPGLVKPSETLSLTCTVSGVSLPDYGVSWIRQPPGKGLEWIGVIWGSETTYYQSSLKSRVTISKDNSKNQVSLKLSSVTAADTAVYYCAKHYYYGGSYAMDYWGQGTLVTVSSTTTPAPRPPTPAPTIASQPLSLRPEACRPAAGGAVHTRGLDFACDIYIWAPLAGTCGVLLLSLVITLYCKRGRKKLLYIFKQPFMRPVQTTQEEDGCSCRFPEEEEGGCELRVKFSRSADAPAYKQGQNQLYNELNLGRREEYDVLDKRRGRDPEMGGKPRRKNPQEGLYNELQKDKMAEAYSEIGMKGERRRGKGHDGLYQGLSTATKDTYDALHMQALPPR

SEQ ID NO: 7914 - protein, 491 aa, synthetic construct
  REGION 1..491: note = Description of Artificial Sequence: Synthetic polypeptide
MALPVTALLLPLALLLHAARPQVQLQESGPGLVKPSETLSLTCTVSGVSLPDYGVSWIRQPPGKGLEWIGVIWGSETTYYSSSLKSRVTISKDNSKNQVSLKLSSVTAADTAVYYCAKHYYYGGSYAMDYWGQGTLVTVSSGGGGSGGGGSGGGGSGGGGSEIVMTQSPATLSLSPGERATLSCRASQDISKYLNWYQQKPGQAPRLLIYHTSRLHSGIPARFSGSGSGTDYTLTISSLQPEDFAVYFCQQGNTLPYTFGQGTKLEIKTTTPAPRPPTPAPTIASQPLSLRPEACRPAAGGAVHTRGLDFACDIYIWAPLAGTCGVLLLSLVITLYCKRGRKKLLYIFKQPFMRPVQTTQEEDGCSCRFPEEEEGGCELRVKFSRSADAPAYKQGQNQLYNELNLGRREEYDVLDKRRGRDPEMGGKPRRKNPQEGLYNELQKDKMAEAYSEIGMKGERRRGKGHDGLYQGLSTATKDTYDALHMQALPPR

SEQ ID NO: 7915 - protein, 491 aa, synthetic construct
  REGION 1..491: note = Description of Artificial Sequence: Synthetic polypeptide
MALPVTALLLPLALLLHAARPQVQLQESGPGLVKPSETLSLTCTVSGVSLPDYGVSWIRQPPGKGLEWIGVIWGSETTYYQSSLKSRVTISKDNSKNQVSLKLSSVTAADTAVYYCAKHYYYGGSYAMDYWGQGTLVTVSSGGGGSGGGGSGGGGSGGGGSEIVMTQSPATLSLSPGERATLSCRASQDISKYLNWYQQKPGQAPRLLIYHTSRLHSGIPARFSGSGSGTDYTLTISSLQPEDFAVYFCQQGNTLPYTFGQGTKLEIKTTTPAPRPPTPAPTIASQPLSLRPEACRPAAGGAVHTRGLDFACDIYIWAPLAGTCGVLLLSLVITLYCKRGRKKLLYIFKQPFMRPVQTTQEEDGCSCRFPEEEEGGCELRVKFSRSADAPAYKQGQNQLYNELNLGRREEYDVLDKRRGRDPEMGGKPRRKNPQEGLYNELQKDKMAEAYSEIGMKGERRRGKGHDGLYQGLSTATKDTYDALHMQALPPR

SEQ ID NO: 7916 - protein, 491 aa, synthetic construct
  REGION 1..491: note = Description of Artificial Sequence: Synthetic polypeptide
MALPVTALLLPLALLLHAARPEIVMTQSPATLSLSPGERATLSCRASQDISKYLNWYQQKPGQAPRLLIYHTSRLHSGIPARFSGSGSGTDYTLTISSLQPEDFAVYFCQQGNTLPYTFGQGTKLEIKGGGGSGGGGSGGGGSGGGGSQVQLQESGPGLVKPSETLSLTCTVSGVSLPDYGVSWIRQPPGKGLEWIGVIWGSETTYYNSSLKSRVTISKDNSKNQVSLKLSSVTAADTAVYYCAKHYYYGGSYAMDYWGQGTLVTVSSTTTPAPRPPTPAPTIASQPLSLRPEACRPAAGGAVHTRGLDFACDIYIWAPLAGTCGVLLLSLVITLYCKRGRKKLLYIFKQPFMRPVQTTQEEDGCSCRFPEEEEGGCELRVKFSRSADAPAYKQGQNQLYNELNLGRREEYDVLDKRRGRDPEMGGKPRRKNPQEGLYNELQKDKMAEAYSEIGMKGERRRGKGHDGLYQGLSTATKDTYDALHMQALPPR

SEQ ID NO: 7917 - protein, 491 aa, synthetic construct; identical to SEQ ID NO: 7916
  REGION 1..491: note = Description of Artificial Sequence: Synthetic polypeptide

SEQ ID NO: 7918 - protein, 491 aa, synthetic construct
  REGION 1..491: note = Description of Artificial Sequence: Synthetic polypeptide
MALPVTALLLPLALLLHAARPQVQLQESGPGLVKPSETLSLTCTVSGVSLPDYGVSWIRQPPGKGLEWIGVIWGSETTYYNSSLKSRVTISKDNSKNQVSLKLSSVTAADTAVYYCAKHYYYGGSYAMDYWGQGTLVTVSSGGGGSGGGGSGGGGSGGGGSEIVMTQSPATLSLSPGERATLSCRASQDISKYLNWYQQKPGQAPRLLIYHTSRLHSGIPARFSGSGSGTDYTLTISSLQPEDFAVYFCQQGNTLPYTFGQGTKLEIKTTTPAPRPPTPAPTIASQPLSLRPEACRPAAGGAVHTRGLDFACDIYIWAPLAGTCGVLLLSLVITLYCKRGRKKLLYIFKQPFMRPVQTTQEEDGCSCRFPEEEEGGCELRVKFSRSADAPAYKQGQNQLYNELNLGRREEYDVLDKRRGRDPEMGGKPRRKNPQEGLYNELQKDKMAEAYSEIGMKGERRRGKGHDGLYQGLSTATKDTYDALHMQALPPR

SEQ ID NO: 7919 - protein, 486 aa, synthetic construct
  REGION 1..486: note = Description of Artificial Sequence: Synthetic polypeptide
MALPVTALLLPLALLLHAARPEIVMTQSPATLSLSPGERATLSCRASQDISKYLNWYQQKPGQAPRLLIYHTSRLHSGIPARFSGSGSGTDYTLTISSLQPEDFAVYFCQQGNTLPYTFGQGTKLEIKGGGGSGGGGSGGGGSQVQLQESGPGLVKPSETLSLTCTVSGVSLPDYGVSWIRQPPGKGLEWIGVIWGSETTYYNSSLKSRVTISKDNSKNQVSLKLSSVTAADTAVYYCAKHYYYGGSYAMDYWGQGTLVTVSSTTTPAPRPPTPAPTIASQPLSLRPEACRPAAGGAVHTRGLDFACDIYIWAPLAGTCGVLLLSLVITLYCKRGRKKLLYIFKQPFMRPVQTTQEEDGCSCRFPEEEEGGCELRVKFSRSADAPAYKQGQNQLYNELNLGRREEYDVLDKRRGRDPEMGGKPRRKNPQEGLYNELQKDKMAEAYSEIGMKGERRRGKGHDGLYQGLSTATKDTYDALHMQALPPR

SEQ ID NO: 7920 - protein, 486 aa, synthetic construct
  REGION 1..486: note = Description of Artificial Sequence: Synthetic polypeptide
MALPVTALLLPLALLLHAARPDIQMTQTTSSLSASLGDRVTISCRASQDISKYLNWYQQKPDGTVKLLIYHTSRLHSGVPSRFSGSGSGTDYSLTISNLEQEDIATYFCQQGNTLPYTFGGGTKLEITGGGGSGGGGSGGGGSEVKLQESGPGLVAPSQSLSVTCTVSGVSLPDYGVSWIRQPPRKGLEWLGVIWGSETTYYNSALKSRLTIIKDNSKSQVFLKMNSLQTDDTAIYYCAKHYYYGGSYAMDYWGQGTSVTVSSTTTPAPRPPTPAPTIASQPLSLRPEACRPAAGGAVHTRGLDFACDIYIWAPLAGTCGVLLLSLVITLYCKRGRKKLLYIFKQPFMRPVQTTQEEDGCSCRFPEEEEGGCELRVKFSRSADAPAYKQGQNQLYNELNLGRREEYDVLDKRRGRDPEMGGKPRRKNPQEGLYNELQKDKMAEAYSEIGMKGERRRGKGHDGLYQGLSTATKDTYDALHMQALPPR

SEQ ID NO: 7921-7938 - skipped (18 entries)

SEQ ID NO: 7939 - protein, 246 aa, synthetic construct
  REGION 1..246: note = Description of Artificial Sequence: Synthetic polypeptide
QVQLVESGGGLVQPGRSLRLSCAASGFTFSNYAMSWVRQAPGKGLGWVSGISRSGENTYYADSVKGRFTISRDNSKNTLYLQMNSLRDEDTAVYYCARSPAHYYGGMDVWGQGTTVTVSSASGGGGSGGRASGGGGSDIVLTQSPGTLSLSPGERATLSCRASQSISSSFLAWYQQKPGQAPRLLIYGASRRATGIPDRFSGSGSGTDFTLTISRLEPEDSAVYYCQQYHSSPSWTFGQGTKLEIK

SEQ ID NO: 7940 - protein, 244 aa, synthetic construct
  REGION 1..244: note = Description of Artificial Sequence: Synthetic polypeptide
QVQLVESGGGLVQPGRSLRLSCAASGFTFDDYAMHWVRQAPGKGLEWVSGISWNSGSIGYADSVKGRFTISRDNAKNSLYLQMNSLRAEDTALYYCSVHSFLAYWGQGTLVTVSSASGGGGSGGRASGGGGSDIVMTQTPLSLPVTPGEPASISCRSSQSLLHSNGYNYLDWYLQKPGQSPQLLIYLGSNRASGVPDRFSGSGSGTDFTLKISRVEAEDVGVYYCMQALQTPYTFGQGTKVEIK

SEQ ID NO: 7941 - protein, 243 aa, synthetic construct
  REGION 1..243: note = Description of Artificial Sequence: Synthetic polypeptide
EVQLLESGGGLVQPGGSLRLSCAVSGFALSNHGMSWVRRAPGKGLEWVSGIVYSGSTYYAASVKGRFTISRDNSRNTLYLQMNSLRPEDTAIYYCSAHGGESDVWGQGTTVTVSSASGGGGSGGRASGGGGSDIVMTQTPLSLSVTPGQPASISCKSSQSLLRNDGKTPLYWYLQKAGQPPQLLIYEVSNRFSGVPDRFSGSGSGTDFTLKISRVEAEDVGAYYCMQNIQFPSFGGGTKLEIK

SEQ ID NO: 7942 - protein, 249 aa, synthetic construct
  REGION 1..249: note = Description of Artificial Sequence: Synthetic polypeptide
QVQLVQSGAEVRKTGASVKVSCKASGYIFDNFGINWVRQAPGQGLEWMGWINPKNNNTNYAQKFQGRVTITADESTNTAYMEVSSLRSEDTAVYYCARGPYYYQSYMDVWGQGTMVTVSSASGGGGSGGRASGGGGSDIVMTQTPLSLPVTPGEPASISCRSSQSLLHSNGYNYLNWYLQKPGQSPQLLIYLGSKRASGVPDRFSGSGSGTDFTLHITRVGAEDVGVYYCMQALQTPYTFGQGTKLEIK

SEQ ID NO: 7943 - protein, 246 aa, synthetic construct
  REGION 1..246: note = Description of Artificial Sequence: Synthetic polypeptide
QVQLQESGGGLVQPGGSLRLSCAASGFTFSSDAMTWVRQAPGKGLEWVSVISGSGGTTYYADSVKGRFTISRDNSKNTLYLQMNSLRAEDTAVYYCAKLDSSGYYYARGPRYWGQGTLVTVSSASGGGGSGGRASGGGGSDIQLTQSPSSLSASVGDRVTITCRASQSISSYLNWYQQKPGKAPKLLIYGASTLASGVPARFSGSGSGTHFTLTINSLQSEDSATYYCQQSYKRASFGQGTKVEIK

SEQ ID NO: 7944 - protein, 247 aa, synthetic construct
  REGION 1..247: note = Description of Artificial Sequence: Synthetic polypeptide
QVQLVQSGAEVKKPGASVKVSCKASGYTFSNYGITWVRQAPGQGLEWMGWISAYNGNTNYAQKFQGRVTMTRNTSISTAYMELSSLRSEDTAVYYCARGPYYYYMDVWGKGTMVTVSSASGGGGSGGRASGGGGSEIVMTQSPLSLPVTPGEPASISCRSSQSLLYSNGYNYVDWYLQKPGQSPQLLIYLGSNRASGVPDRFSGSGSGTDFKLQISRVEAEDVGIYYCMQGRQFPYSFGQGTKVEIK

SEQ ID NO: 7945 - protein, 238 aa, synthetic construct
  REGION 1..238: note = Description of Artificial Sequence: Synthetic polypeptide
EVQLLETGGGLVQPGGSLRLSCAVSGFALSNHGMSWVRRAPGKGLEWVSGIVYSGSTYYAASVKGRFTISRDNSRNTLYLQMNSLRPEDTAIYYCSAHGGESDVWGQGTTVTVSSASGGGGSGGRASGGGGSEIVLTQSPATLSVSPGESATLSCRASQSVSSNLAWYQQKPGQAPRLLIYGASTRASGIPDRFSGSGSGTDFTLTISSLQAEDVAVYYCQQYGSSLTFGGGTKVEIK

SEQ ID NO: 7946 - protein, 239 aa, synthetic construct
  REGION 1..239: note = Description of Artificial Sequence: Synthetic polypeptide
EVQLVETGGGLVQPGGSLRLSCAVSGFALSNHGMSWVRRAPGKGLEWVSGIVYSGSTYYAASVKGRFTISRDNSRNTLYLQMNSLRPEDTAIYYCSAHGGESDVWGQGTTVTVSSASGGGGSGGRASGGGGSEIVMTQSPATLSVSPGERATLSCRASQSVSSKLAWYQQKPGQAPRLLMYGASIRATGIPDRFSGSGSGTEFTLTISSLEPEDFAVYYCQQYGSSSWTFGQGTKVEIK

SEQ ID NO: 7947 - protein, 241 aa, synthetic construct
  REGION 1..241: note = Description of Artificial Sequence: Synthetic polypeptide
EVQLVETGGGVVQPGGSLRLSCAVSGFALSNHGMSWVRRAPGKGLEWVSGIVYSGSTYYAASVKGRFTISRDNSRNTLYLQMNSLRPEDTAIYYCSAHGGESDVWGQGTTVTVSSASGGGGSGGRASGGGGSEIVLTQSPGTLSLSPGERATLSCRASQSVGSTNLAWYQQKPGQAPRLLIYDASNRATGIPDRFSGGGSGTDFTLTISRLEPEDFAVYYCQQYGSSPPWTFGQGTKVEIK

SEQ ID NO: 7948 - protein, 239 aa, synthetic construct
  REGION 1..239: note = Description of Artificial Sequence: Synthetic polypeptide
QVQLVESGGGLVKPGGSLRLSCAASGFTFSDYYMSWIRQAPGKGLEWVSYISSSGSTIYYADSVKGRFTISRDNAKNSLYLQMNSLRAEDTAVYYCARESGDGMDVWGQGTTVTVSSASGGGGSGGRASGGGGSDIQMTQSPSSLSASVGDRVTITCRASQSISSYLNWYQQKPGKAPKLLIYAASSLQSGVPSRFSGSGSGTDFTLTISSLQPEDFATYYCQQSYTLAFGQGTKVDIK

SEQ ID NO: 7949 - protein, 239 aa, synthetic construct
  REGION 1..239: note = Description of Artificial Sequence: Synthetic polypeptide
EVQLVESGGGLVQPGGSLRLSCAVSGFALSNHGMSWVRRAPGKGLEWVSGIVYSGSTYYAASVKGRFTISRDNSRNTLYLQMNSLRPEDTAIYYCSAHGGESDVWGQGTTVTVSSASGGGGSGGRASGGGGSDIQLTQSPSSLSASVGDRVTITCRASQSISSYLNWYQQKPGKAPKLLIYAASSLQSGVPSRFSGSGSGTDFTLTISSLQPEDFATYYCQQSYSTPYTFGQGTKVEIK

SEQ ID NO: 7950 - protein, 246 aa, synthetic construct
  REGION 1..246: note = Description of Artificial Sequence: Synthetic polypeptide
QVQLVQSGGGLVKPGGSLRLSCAASGFTFSDYYMSWIRQAPGKGLEWVSYISSSGNTIYYADSVKGRFTISRDNAKNSLYLQMNSLRAEDTAVYYCARSTMVREDYWGQGTLVTVSSASGGGGSGGRASGGGGSDIVLTQSPLSLPVTLGQPASISCKSSESLVHNSGKTYLNWFHQRPGQSPRRLIYEVSNRDSGVPDRFTGSGSGTDFTLKISRVEAEDVGVYYCMQGTHWPGTFGQGTKLEIK

SEQ ID NO: 7951 - protein, 239 aa, synthetic construct
  REGION 1..239: note = Description of Artificial Sequence: Synthetic polypeptide
QVQLVESGGGLVQPGGSLRLSCAVSGFALSNHGMSWVRRAPGKGLEWVSGIVYSGSTYYAASVKGRFTISRDNSRNTLYLQMNSLRPEDTAIYYCSAHGGESDVWGQGTTVTVSSASGGGGSGGRASGGGGSDIRLTQSPSPLSASVGDRVTITCQASEDINKFLNWYHQTPGKAPKLLIYDASTLQTGVPSRFSGSGSGTDFTLTINSLQPEDIGTYYCQQYESLPLTFGGGTKVEIK

SEQ ID NO: 7952 - protein, 240 aa, synthetic construct
  REGION 1..240: note = Description of Artificial Sequence: Synthetic polypeptide
EVQLVETGGGLVQPGGSLRLSCAVSGFALSNHGMSWVRRAPGKGLEWVSGIVYSGSTYYAASVKGRFTISRDNSRNTLYLQMNSLRPEDTAIYYCSAHGGESDVWGQGTTVTVSSASGGGGSGGRASGGGGSETTLTQSPATLSVSPGERATLSCRASQSVGSNLAWYQQKPGQGPRLLIYGASTRATGIPARFSGSGSGTEFTLTISSLQPEDFAVYYCQQYNDWLPVTFGQGTKVEIK

SEQ ID NO: 7953 - protein, 241 aa, synthetic construct
  REGION 1..241: note = Description of Artificial Sequence: Synthetic polypeptide
EVQLVESGGGLVQPGGSLRLSCAVSGFALSNHGMSWVRRAPGKGLEWVSGIVYSGSTYYAASVKGRFTISRDNSRNTLYLQMNSLRPEDTAIYYCSAHGGESDVWGQGTTVTVSSASGGGGSGGRASGGGGSEIVLTQSPGTLSLSPGERATLSCRASQSIGSSSLAWYQQKPGQAPRLLMYGASSRASGIPDRFSGSGSGTDFTLTISRLEPEDFAVYYCQQYAGSPPFTFGQGTKVEIK

SEQ ID NO: 7954 - DNA, 738 bp, synthetic construct
  misc_feature 1..738: note = Description of Artificial Sequence: Synthetic polynucleotide
  source 1..738: mol_type = other DNA
caagtgcaactcgtggaatctggtggaggactcgtgcaacccggaagatcgcttagactgtcgtgtgccgccagcgggttcactttctcgaactacgcgatgtcctgggtccgccaggcacccggaaagggactcggttgggtgtccggcatttcccggtccggcgaaaatacctactacgccgactccgtgaagggccgcttcaccatctcaagggacaacagcaaaaacaccctgtacttgcaaatgaactccctgcgggatgaagatacagccgtgtactattgcgcccggtcgcctgcccattactacggcggaatggacgtctggggacagggaaccactgtgactgtcagcagcgcgtcgggtggcggcggctcagggggtcgggcctccggggggggagggtccgacatcgtgctgacccagtccccgggaaccctgagcctgagcccgggagagcgcgcgaccctgtcatgccgggcatcccagagcattagctcctcctttctcgcctggtatcagcagaagcccggacaggccccgaggctgctgatctacggcgctagcagaagggctaccggaatcccagaccggttctccggctccggttccgggaccgatttcacccttactatctcgcgcctggaacctgaggactccgccgtctactactgccagcagtaccactcatccccgtcgtggacgttcggacagggcaccaagctggagattaag

SEQ ID NO: 7955 - DNA, 732 bp, synthetic construct
  misc_feature 1..732: note = Description of Artificial Sequence: Synthetic polynucleotide
  source 1..732: mol_type = other DNA
caagtgcaactcgtcgaatccggtggaggtctggtccaacctggtagaagcctgagactgtcgtgtgcggccagcggattcacctttgatgactatgctatgcactgggtgcggcaggccccaggaaagggcctggaatgggtgtcgggaattagctggaactccgggtccattggctacgccgactccgtgaagggccgcttcaccatctcccgcgacaacgcaaagaactccctgtacttgcaaatgaactcgctcagggctgaggataccgcgctgtactactgctccgtgcattccttcctggcctactggggacagggaactctggtcaccgtgtcgagcgcctccggcggcgggggctcgggtggacgggcctcgggcggaggggggtccgacatcgtgatgacccagaccccgctgagcttgcccgtgactcccggagagcctgcatccatctcctgccggtcatcccagtcccttctccactccaacggatacaactacctcgactggtacctccagaagccgggacagagccctcagcttctgatctacctggggtcaaatagagcctcaggagtgccggatcggttcagcggatctggttcgggaactgatttcactctgaagatttcccgcgtggaagccgaggacgtgggcgtctactactgtatgcaggcgctgcagaccccctataccttcggccaagggacgaaagtggagatcaag

SEQ ID NO: 7956 - DNA, 729 bp, synthetic construct
  misc_feature 1..729: note = Description of Artificial Sequence: Synthetic polynucleotide
  source 1..729: mol_type = other DNA
gaagtgcaattgttggaatctggaggaggacttgtgcagcctggaggatcactgagactttcgtgtgcggtgtcaggcttcgccctgagcaaccacggcatgagctgggtgcggagagccccggggaagggtctggaatgggtgtccgggatcgtctactccggttcaacttactacgccgcaagcgtgaagggtcgcttcaccatttcccgcgataactcccggaacaccctgtacctccaaatgaactccctgcggcccgaggacaccgccatctactactgttccgcgcatggaggagagtccgatgtctggggacagggcactaccgtgaccgtgtcgagcgcctcggggggaggaggctccggcggtcgcgcctccggggggggtggcagcgacattgtgatgacgcagactccactctcgctgtccgtgaccccgggacagcccgcgtccatctcgtgcaagagctcccagagcctgctgaggaacgacggaaagactcctctgtattggtacctccagaaggctggacagcccccgcaactgctcatctacgaagtgtcaaatcgcttctccggggtgccggatcggttttccggctcgggatcgggcaccgacttcaccctgaaaatctccagggtcgaggccgaggacgtgggagcctactactgcatgcaaaacatccagttcccttccttcggcggcggcacaaagctggagattaag

SEQ ID NO: 7957 - DNA, 747 bp, synthetic construct
  misc_feature 1..747: note = Description of Artificial Sequence: Synthetic polynucleotide
  source 1..747: mol_type = other DNA
caagtccaactcgtccagtccggcgcagaagtcagaaaaaccggtgctagcgtgaaagtgtcctgcaaggcctccggctacattttcgataacttcggaatcaactgggtcagacaggccccgggccaggggctggaatggatgggatggatcaaccccaagaacaacaacaccaactacgcacagaagttccagggccgcgtgactatcaccgccgatgaatcgaccaataccgcctacatggaggtgtcctccctgcggtcggaggacactgccgtgtattactgcgcgaggggcccatactactaccaaagctacatggacgtctggggacagggaaccatggtgaccgtgtcatccgcctccggtggtggaggctccggggggcgggcttcaggaggcggaggaagcgatattgtgatgacccagactccgcttagcctgcccgtgactcctggagaaccggcctccatttcctgccggtcctcgcaatcactcctgcattccaacggttacaactacctgaattggtacctccagaagcctggccagtcgccccagttgctgatctatctgggctcgaagcgcgcctccggggtgcctgaccggtttagcggatctgggagcggcacggacttcactctccacatcacccgcgtgggagcggaggacgtgggagtgtactactgtatgcaggcgctgcagactccgtacacattcggacagggcaccaagctggagatcaag

SEQ ID NO: 7958 - DNA, 738 bp, synthetic construct
  misc_feature 1..738: note = Description of Artificial Sequence: Synthetic polynucleotide
  source 1..738: mol_type = other DNA
caagtgcaacttcaagaatcaggcggaggactcgtgcagcccggaggatcattgcggctctcgtgcgccgcctcgggcttcaccttctcgagcgacgccatgacctgggtccgccaggccccggggaaggggctggaatgggtgtctgtgatttccggctccgggggaactacgtactacgccgattccgtgaaaggtcgcttcactatctcccgggacaacagcaagaacaccctttatctgcaaatgaattccctccgcgccgaggacaccgccgtgtactactgcgccaagctggactcctcgggctactactatgcccggggtccgagatactggggacagggaaccctcgtgaccgtgtcctccgcgtccggcggaggagggtcgggagggcgggcctccggcggcggcggttcggacatccagctgacccagtccccatcctcactgagcgcaagcgtgggcgacagagtcaccattacatgcagggcgtcccagagcatcagctcctacctgaactggtaccaacagaagcctggaaaggctcctaagctgttgatctacggggcttcgaccctggcatccggggtgcccgcgaggtttagcggaagcggtagcggcactcacttcactctgaccattaacagcctccagtccgaggattcagccacttactactgtcagcagtcctacaagcgggccagcttcggacagggcactaaggtcgagatcaag

SEQ ID NO: 7959 - DNA, 741 bp, synthetic construct
  misc_feature 1..741: note = Description of Artificial Sequence: Synthetic polynucleotide
  source 1..741: mol_type = other DNA
caagtccaactggtccagagcggtgcagaagtgaagaagcccggagcgagcgtgaaagtgtcctgcaaggcttccgggtacaccttctccaactacggcatcacttgggtgcgccaggccccgggacagggcctggaatggatggggtggatttccgcgtacaacggcaatacgaactacgctcagaagttccagggtagagtgaccatgactaggaacacctccatttccaccgcctacatggaactgtcctccctgcggagcgaggacaccgccgtgtactattgcgcccggggaccatactactactacatggatgtctgggggaaggggactatggtcaccgtgtcatccgcctcgggaggcggcggatcaggaggacgcgcctctggtggtggaggatcggagatcgtgatgacccagagccctctctccttgcccgtgactcctggggagcccgcatccatttcatgccggagctcccagtcacttctctactccaacggctataactacgtggattggtacctccaaaagccgggccagagcccgcagctgctgatctacctgggctcgaacagggccagcggagtgcctgaccggttctccgggtcgggaagcgggaccgacttcaagctgcaaatctcgagagtggaggccgaggacgtgggaatctactactgtatgcagggccgccagtttccgtactcgttcggacagggcaccaaagtggaaatcaag

SEQ ID NO: 7960 - DNA, 714 bp, synthetic construct
  misc_feature 1..714: note = Description of Artificial Sequence: Synthetic polynucleotide
  source 1..714: mol_type = other DNA
gaagtgcaattgctcgaaactggaggaggtctggtgcaacctggaggatcacttcgcctgtcctgcgccgtgtcgggctttgccctgtccaaccatggaatgagctgggtccgccgcgcgccggggaagggcctcgaatgggtgtccggcatcgtctactccggctccacctactacgccgcgtccgtgaagggccggttcacgatttcacgggacaactcgcggaacaccctgtacctccaaatgaattcccttcggccggaggatactgccatctactactgctccgcccacggtggcgaatccgacgtctggggccagggaaccaccgtgaccgtgtccagcgcgtccgggggaggaggaagcgggggtagagcatcgggtggaggcggatcagagatcgtgctgacccagtcccccgccaccttgagcgtgtcaccaggagagtccgccaccctgtcatgccgcgccagccagtccgtgtcctccaacctggcttggtaccagcagaagccggggcaggcccctagactcctgatctatggggcgtcgacccgggcatctggaattcccgataggttcagcggatcgggctcgggcactgacttcactctgaccatctcctcgctgcaagccgaggacgtggctgtgtactactgtcagcagtacggaagctccctgactttcggtggcgggaccaaagtcgagattaag

SEQ ID NO: 7961 - DNA, 717 bp, synthetic construct
  misc_feature 1..717: note = Description of Artificial Sequence: Synthetic polynucleotide
  source 1..717: mol_type = other DNA
gaagtgcaattggtggaaactggaggaggacttgtgcaacctggaggatcattgagactgagctgcgcagtgtcgggattcgccctgagcaaccatggaatgtcctgggtcagaagggcccctggaaaaggcctcgaatgggtgtcagggatcgtgtactccggttccacttactacgccgcctccgtgaaggggcgcttcactatctcacgggataactcccgcaataccctgtacctccaaatgaacagcctgcggccggaggataccgccatctactactgttccgcccacggtggagagtctgacgtctggggccagggaactaccgtgaccgtgtcctccgcgtccggcggtggagggagcggcggccgcgccagcggcggcggaggctccgagatcgtgatgacccagagccccgctactctgtcggtgtcgcccggagaaagggcgaccctgtcctgccgggcgtcgcagtccgtgagcagcaagctggcttggtaccagcagaagccgggccaggcaccacgcctgcttatgtacggtgcctccattcgggccaccggaatcccggaccggttctcggggtcggggtccggtaccgagttcacactgaccatttcctcgctcgagcccgaggactttgccgtctattactgccagcagtacggctcctcctcatggacgttcggccaggggaccaaggtcgaaatcaag

SEQ ID NO: 7962 - DNA, 723 bp, synthetic construct
  misc_feature 1..723: note = Description of Artificial Sequence: Synthetic polynucleotide
  source 1..723: mol_type = other DNA
gaagtgcaattggtggagactggaggaggagtggtgcaacctggaggaagcctgagactgtcatgcgcggtgtcgggcttcgccctctccaaccacggaatgtcctgggtccgccgggcccctgggaaaggacttgaatgggtgtccggcatcgtgtactcgggttccacctactacgcggcctcagtgaagggccggtttactattagccgcgacaactccagaaacacactgtacctccaaatgaactcgctgcggccggaagataccgctatctactactgctccgcccatgggggagagtcggacgtctggggacagggcaccactgtcactgtgtccagcgcttccggcggtggtggaagcgggggacgggcctcaggaggcggtggcagcgagattgtgctgacccagtcccccgggaccctgagcctgtccccgggagaaagggccaccctctcctgtcgggcatcccagtccgtggggtctactaaccttgcatggtaccagcagaagcccggccaggcccctcgcctgctgatctacgacgcgtccaatagagccaccggcatcccggatcgcttcagcggaggcggatcgggcaccgacttcaccctcaccatttcaaggctggaaccggaggacttcgccgtgtactactgccagcagtatggttcgtccccaccctggacgttcggccaggggactaaggtcgagatcaag

SEQ ID NO: 7963 - DNA, 717 bp, synthetic construct
  misc_feature 1..717: note = Description of Artificial Sequence: Synthetic polynucleotide
  source 1..717: mol_type = other DNA
caagtgcaactcgtggaatctggtggaggactcgtgaaacctggaggatcattgagactgtcatgcgcggcctcgggattcacgttctccgattactacatgagctggattcgccaggctccggggaagggactggaatgggtgtcctacatttcctcatccggctccaccatctactacgcggactccgtgaaggggagattcaccattagccgcgataacgccaagaacagcctgtaccttcagatgaactccctgcgggctgaagatactgccgtctactactgcgcaagggagagcggagatgggatggacgtctggggacagggtaccactgtgaccgtgtcgtcggcctccggcggagggggttcgggtggaagggccagcggcggcggaggcagcgacatccagatgacccagtccccctcatcgctgtccgcctccgtgggcgaccgcgtcaccatcacatgccgggcctcacagtcgatctcctcctacctcaattggtatcagcagaagcccggaaaggcccctaagcttctgatctacgcagcgtcctccctgcaatccggggtcccatctcggttctccggctcgggcagcggtaccgacttcactctgaccatctcgagcctgcagccggaggacttcgccacttactactgtcagcaaagctacaccctcgcgtttggccagggcaccaaagtggacatcaag

SEQ ID NO: 7964 - DNA, 717 bp, synthetic construct
  misc_feature 1..717: note = Description of Artificial Sequence: Synthetic polynucleotide
  source 1..717: mol_type = other DNA
gaagtgcaattggtggaatcagggggaggacttgtgcagcctggaggatcgctgagactgtcatgtgccgtgtccggctttgccctgtccaaccacgggatgtcctgggtccgccgcgcgcctggaaagggcctcgaatgggtgtcgggtattgtgtacagcggtagcacctactatgccgcatccgtgaaggggagattcaccatcagccgggacaactccaggaacactctgtacctccaaatgaattcgctgaggccagaggacactgccatctactactgctccgcgcatggcggagagtccgacgtctggggacaggggaccaccgtgaccgtgtctagcgcgtccggcggaggcggcagcgggggtcgggcatcagggggcggcggatcggacatccagctcacccagtccccgagctcgctgtccgcctccgtgggagatcgggtcaccatcacgtgccgcgccagccagtcgatttcctcctacctgaactggtaccaacagaagcccggaaaagccccgaagcttctcatctacgccgcctcgagcctgcagtcaggagtgccctcacggttctccggctccggttccggtactgatttcaccctgaccatttcctccctgcaaccggaggacttcgctacttactactgccagcagtcgtactccaccccctacactttcggacaaggcaccaaggtcgaaatcaag

SEQ ID NO: 7965 - DNA, 738 bp, synthetic construct
  misc_feature 1..738: note = Description of Artificial Sequence: Synthetic polynucleotide
  source 1..738: mol_type = other DNA
caagtgcaactggtgcaaagcggaggaggattggtcaaacccggaggaagcctgagactgtcatgcgcggcctctggattcaccttctccgattactacatgtcatggatcagacaggccccggggaagggcctcgaatgggtgtcctacatctcgtcctccgggaacaccatctactacgccgacagcgtgaagggccgctttaccatttcccgcgacaacgcaaagaactcgctgtaccttcagatgaattccctgcgggctgaagataccgcggtgtactattgcgcccggtccactatggtccgggaggactactggggacagggcacactcgtgaccgtgtccagcgcgagcgggggtggaggcagcggtggacgcgcctccggcggcggcggttcagacatcgtgctgactcagtcgcccctgtcgctgccggtcaccctgggccaaccggcctcaattagctgcaagtcctcggagagcctggtgcacaactcaggaaagacttacctgaactggttccatcagcggcctggacagtccccacggaggctcatctatgaagtgtccaacagggattcgggggtgcccgaccgcttcactggctccgggtccggcaccgacttcaccttgaaaatctccagagtggaagccgaggacgtgggcgtgtactactgtatgcagggtacccactggcctggaacctttggacaaggaactaagctcgagattaag

SEQ ID NO: 7966 - DNA, 717 bp, synthetic construct
  misc_feature 1..717: note = Description of Artificial Sequence: Synthetic polynucleotide
  source 1..717: mol_type = other DNA
caagtgcaactcgtggaatctggtggaggactcgtgcaacccggtggaagccttaggctgtcgtgcgccgtcagcgggtttgctctgagcaaccatggaatgtcctgggtccgccgggcaccgggaaaagggctggaatgggtgtccggcatcgtgtacagcgggtcaacctattacgccgcgtccgtgaagggcagattcactatctcaagagacaacagccggaacaccctgtacttgcaaatgaattccctgcgccccgaggacaccgccatctactactgctccgcccacggaggagagtcggacgtgtggggccagggaacgactgtgactgtgtccagcgcatcaggagggggtggttcgggcggccgggcctcggggggaggaggttccgacattcggctgacccagtccccgtccccactgtcggcctccgtcggcgaccgcgtgaccatcacttgtcaggcgtccgaggacattaacaagttcctgaactggtaccaccagacccctggaaaggcccccaagctgctgatctacgatgcctcgacccttcaaactggagtgcctagccggttctccgggtccggctccggcactgatttcactctgaccatcaactcattgcagccggaagatatcgggacctactattgccagcagtacgaatccctcccgctcacattcggcgggggaaccaaggtcgagattaag

SEQ ID NO: 7967 - DNA, 720 bp, synthetic construct
  misc_feature 1..720: note = Description of Artificial Sequence: Synthetic polynucleotide
  source 1..720: mol_type = other DNA
gaagtgcaattggtggaaactggaggaggacttgtgcaacctggaggatcattgcggctctcatgcgctgtctccggcttcgccctgtcaaatcacgggatgtcgtgggtcagacgggccccgggaaagggtctggaatgggtgtcggggattgtgtacagcggctccacctactacgccgcttcggtcaagggccgcttcactatttcacgggacaacagccgcaacaccctctatctgcaaatgaactctctccgcccggaggataccgccatctactactgctccgcacacggcggcgaatccgacgtgtggggacagggaaccactgtcaccgtgtcgtccgcatccggtggcggaggatcgggtggccgggcctccgggggcggcggcagcgagactaccctgacccagtcccctgccactctgtccgtgagcccgggagagagagccacccttagctgccgggccagccagagcgtgggctccaacctggcctggtaccagcagaagccaggacagggtcccaggctgctgatctacggagcctccactcgcgcgaccggcatccccgcgaggttctccgggtcgggttccgggaccgagttcaccctgaccatctcctccctccaaccggaggacttcgcggtgtactactgtcagcagtacaacgattggctgcccgtgacatttggacaggggacgaaggtggaaatcaaa

SEQ ID NO: 7968 - DNA, 723 bp, synthetic construct
  misc_feature 1..723: note = Description of Artificial Sequence: Synthetic polynucleotide
  source 1..723: mol_type = other DNA
gaagtgcaattggtggaatctggtggaggacttgtgcaacctggaggatcactgagactgtcatgcgcggtgtccggttttgccctgagcaatcatgggatgtcgtgggtccggcgcgcccccggaaagggtctggaatgggtgtcgggtatcgtctactccgggagcacttactacgccgcgagcgtgaagggccgcttcaccatttcccgcgataactcccgcaacaccctgtacttgcaaatgaactcgctccggcctgaggacactgccatctactactgctccgcacacggaggagaatccgacgtgtggggccagggaactaccgtgaccgtcagcagcgcctccggcggcgggggctcaggcggacgggctagcggcggcggtggctccgagatcgtgctgacccagtcgcctggcactctctcgctgagccccggggaaagggcaaccctgtcctgtcgggccagccagtccattggatcatcctccctcgcctggtatcagcagaaaccgggacaggctccgcggctgcttatgtatggggccagctcaagagcctccggcattcccgaccggttctccgggtccggttccggcaccgatttcaccctgactatctcgaggctggagccagaggacttcgccgtgtactactgccagcagtacgcggggtccccgccgttcacgttcggacagggaaccaaggtcgagatcaag

SEQ ID NO: 7969 - protein, 120 aa, synthetic construct
  REGION 1..120: note = Description of Artificial Sequence: Synthetic polypeptide
QVQLVESGGGLVQPGRSLRLSCAASGFTFSNYAMSWVRQAPGKGLGWVSGISRSGENTYYADSVKGRFTISRDNSKNTLYLQMNSLRDEDTAVYYCARSPAHYYGGMDVWGQGTTVTVSS

SEQ ID NO: 7970 - protein, 115 aa, synthetic construct
  REGION 1..115: note = Description of Artificial Sequence: Synthetic polypeptide
QVQLVESGGGLVQPGRSLRLSCAASGFTFDDYAMHWVRQAPGKGLEWVSGISWNSGSIGYADSVKGRFTISRDNAKNSLYLQMNSLRAEDTALYYCSVHSFLAYWGQGTLVTVSS

SEQ ID NO: 7971 - protein, 115 aa, synthetic construct
  REGION 1..115: note = Description of Artificial Sequence: Synthetic polypeptide
EVQLLESGGGLVQPGGSLRLSCAVSGFALSNHGMSWVRRAPGKGLEWVSGIVYSGSTYYAASVKGRFTISRDNSRNTLYLQMNSLRPEDTAIYYCSAHGGESDVWGQGTTVTVSS

SEQ ID NO: 7972 - protein, 120 aa, synthetic construct
  REGION 1..120: note = Description of Artificial Sequence: Synthetic polypeptide
QVQLVQSGAEVRKTGASVKVSCKASGYIFDNFGINWVRQAPGQGLEWMGWINPKNNNTNYAQKFQGRVTITADESTNTAYMEVSSLRSEDTAVYYCARGPYYYQSYMDVWGQGTMVTVSS

SEQ ID NO: 7973 - protein, 123 aa, synthetic construct
  REGION 1..123: note = Description of Artificial Sequence: Synthetic polypeptide
QVQLQESGGGLVQPGGSLRLSCAASGFTFSSDAMTWVRQAPGKGLEWVSVISGSGGTTYYADSVKGRFTISRDNSKNTLYLQMNSLRAEDTAVYYCAKLDSSGYYYARGPRYWGQGTLVTVSS

SEQ ID NO: 7974 - protein, 118 aa, synthetic construct
  REGION 1..118: note = Description of Artificial Sequence: Synthetic polypeptide
QVQLVQSGAEVKKPGASVKVSCKASGYTFSNYGITWVRQAPGQGLEWMGWISAYNGNTNYAQKFQGRVTMTRNTSISTAYMELSSLRSEDTAVYYCARGPYYYYMDVWGKGTMVTVSS

SEQ ID NO: 7975 - protein, 115 aa, synthetic construct
  REGION 1..115: note = Description of Artificial Sequence: Synthetic polypeptide
EVQLLETGGGLVQPGGSLRLSCAVSGFALSNHGMSWVRRAPGKGLEWVSGIVYSGSTYYAASVKGRFTISRDNSRNTLYLQMNSLRPEDTAIYYCSAHGGESDVWGQGTTVTVSS

SEQ ID NO: 7976 - protein, 115 aa, synthetic construct
  REGION 1..115: note = Description of Artificial Sequence: Synthetic polypeptide
EVQLVETGGGLVQPGGSLRLSCAVSGFALSNHGMSWVRRAPGKGLEWVSGIVYSGSTYYAASVKGRFTISRDNSRNTLYLQMNSLRPEDTAIYYCSAHGGESDVWGQGTTVTVSS

SEQ ID NO: 7977 - protein, 115 aa, synthetic construct
  REGION 1..115: note = Description of Artificial Sequence: Synthetic polypeptide
EVQLVETGGGVVQPGGSLRLSCAVSGFALSNHGMSWVRRAPGKGLEWVSGIVYSGSTYYAASVKGRFTISRDNSRNTLYLQMNSLRPEDTAIYYCSAHGGESDVWGQGTTVTVSS

SEQ ID NO: 7978 - protein, 117 aa, synthetic construct
  REGION 1..117: note = Description of Artificial Sequence: Synthetic polypeptide
QVQLVESGGGLVKPGGSLRLSCAASGFTFSDYYMSWIRQAPGKGLEWVSYISSSGSTIYYADSVKGRFTISRDNAKNSLYLQMNSLRAEDTAVYYCARESGDGMDVWGQGTTVTVSS

SEQ ID NO: 7979 - protein, 115 aa, synthetic construct
  REGION 1..115: note = Description of Artificial Sequence: Synthetic polypeptide
EVQLVESGGGLVQPGGSLRLSCAVSGFALSNHGMSWVRRAPGKGLEWVSGIVYSGSTYYAASVKGRFTISRDNSRNTLYLQMNSLRPEDTAIYYCSAHGGESDVWGQGTTVTVSS

SEQ ID NO: 7980 - protein, 117 aa, synthetic construct
  REGION 1..117: note = Description of Artificial Sequence: Synthetic polypeptide
QVQLVQSGGGLVKPGGSLRLSCAASGFTFSDYYMSWIRQAPGKGLEWVSYISSSGNTIYYADSVKGRFTISRDNAKNSLYLQMNSLRAEDTAVYYCARSTMVREDYWGQGTLVTVSS

SEQ ID NO: 7981 - protein, 115 aa, synthetic construct
  REGION 1..115: note = Description of Artificial Sequence: Synthetic polypeptide
QVQLVESGGGLVQPGGSLRLSCAVSGFALSNHGMSWVRRAPGKGLEWVSGIVYSGSTYYAASVKGRFTISRDNSRNTLYLQMNSLRPEDTAIYYCSAHGGESDVWGQGTTVTVSS

SEQ ID NO: 7982 - protein, 115 aa, synthetic construct; identical to SEQ ID NO: 7976
  REGION 1..115: note = Description of Artificial Sequence: Synthetic polypeptide

SEQ ID NO: 7983 - protein, 115 aa, synthetic construct; identical to SEQ ID NO: 7979
  REGION 1..115: note = Description of Artificial Sequence: Synthetic polypeptide

SEQ ID NO: 7984 - protein, 109 aa, synthetic construct
  REGION 1..109: note = Description of Artificial Sequence: Synthetic polypeptide
DIVLTQSPGTLSLSPGERATLSCRASQSISSSFLAWYQQKPGQAPRLLIYGASRRATGIPDRFSGSGSGTDFTLTISRLEPEDSAVYYCQQYHSSPSWTFGQGTKLEIK

SEQ ID NO: 7985 - protein, 112 aa, synthetic construct
  REGION 1..112: note = Description of Artificial Sequence: Synthetic polypeptide
DIVMTQTPLSLPVTPGEPASISCRSSQSLLHSNGYNYLDWYLQKPGQSPQLLIYLGSNRASGVPDRFSGSGSGTDFTLKISRVEAEDVGVYYCMQALQTPYTFGQGTKVEIK

SEQ ID NO: 7986 - protein, 111 aa, synthetic construct
  REGION 1..111: note = Description of Artificial Sequence: Synthetic polypeptide
DIVMTQTPLSLSVTPGQPASISCKSSQSLLRNDGKTPLYWYLQKAGQPPQLLIYEVSNRFSGVPDRFSGSGSGTDFTLKISRVEAEDVGAYYCMQNIQFPSFGGGTKLEIK

SEQ ID NO: 7987 - protein, 112 aa, synthetic construct
  REGION 1..112: note = Description of Artificial Sequence: Synthetic polypeptide
DIVMTQTPLSLPVTPGEPASISCRSSQSLLHSNGYNYLNWYLQKPGQSPQLLIYLGSKRASGVPDRFSGSGSGTDFTLHITRVGAEDVGVYYCMQALQTPYTFGQGTKLEIK

SEQ ID NO: 7988 - protein, 106 aa, synthetic construct
  REGION 1..106: note = Description of Artificial Sequence: Synthetic polypeptide
DIQLTQSPSSLSASVGDRVTITCRASQSISSYLNWYQQKPGKAPKLLIYGASTLASGVPARFSGSGSGTHFTLTINSLQSEDSATYYCQQSYKRASFGQGTKVEIK

SEQ ID NO: 7989 - protein, 112 aa, synthetic construct
  REGION 1..112: note = Description of Artificial Sequence: Synthetic polypeptide
EIVMTQSPLSLPVTPGEPASISCRSSQSLLYSNGYNYVDWYLQKPGQSPQLLIYLGSNRASGVPDRFSGSGSGTDFKLQISRVEAEDVGIYYCMQGRQFPYSFGQGTKVEIK

SEQ ID NO: 7990 - protein, 106 aa, synthetic construct
  REGION 1..106: note = Description of Artificial Sequence: Synthetic polypeptide
EIVLTQSPATLSVSPGESATLSCRASQSVSSNLAWYQQKPGQAPRLLIYGASTRASGIPDRFSGSGSGTDFTLTISSLQAEDVAVYYCQQYGSSLTFGGGTKVEIK

SEQ ID NO: 7991 - protein, 107 aa, synthetic construct
  REGION 1..107: note = Description of Artificial Sequence: Synthetic polypeptide
EIVMTQSPATLSVSPGERATLSCRASQSVSSKLAWYQQKPGQAPRLLMYGASIRATGIPDRFSGSGSGTEFTLTISSLEPEDFAVYYCQQYGSSSWTFGQGTKVEIK

SEQ ID NO: 7992 - protein, 109 aa, synthetic construct
  REGION 1..109: note = Description of Artificial Sequence: Synthetic polypeptide
EIVLTQSPGTLSLSPGERATLSCRASQSVGSTNLAWYQQKPGQAPRLLIYDASNRATGIPDRFSGGGSGTDFTLTISRLEPEDFAVYYCQQYGSSPPWTFGQGTKVEIK

SEQ ID NO: 7993 - protein, 105 aa, synthetic construct
  REGION 1..105: note = Description of Artificial Sequence: Synthetic polypeptide
DIQMTQSPSSLSASVGDRVTITCRASQSISSYLNWYQQKPGKAPKLLIYAASSLQSGVPSRFSGSGSGTDFTLTISSLQPEDFATYYCQQSYTLAFGQGTKVDIK

SEQ ID NO: 7994 - protein, 107 aa, synthetic construct
  REGION 1..107: note = Description of Artificial Sequence: Synthetic polypeptide
DIQLTQSPSSLSASVGDRVTITCRASQSISSYLNWYQQKPGKAPKLLIYAASSLQSGVPSRFSGSGSGTDFTLTISSLQPEDFATYYCQQSYSTPYTFGQGTKVEIK

SEQ ID NO: 7995 - protein, 112 aa, synthetic construct
  REGION 1..112: note = Description of Artificial Sequence: Synthetic polypeptide
DIVLTQSPLSLPVTLGQPASISCKSSESLVHNSGKTYLNWFHQRPGQSPRRLIYEVSNRDSGVPDRFTGSGSGTDFTLKISRVEAEDVGVYYCMQGTHWPGTFGQGTKLEIK

SEQ ID NO: 7996 - protein, 107 aa, synthetic construct
  REGION 1..107: note = Description of Artificial Sequence: Synthetic polypeptide
DIRLTQSPSPLSASVGDRVTITCQASEDINKFLNWYHQTPGKAPKLLIYDASTLQTGVPSRFSGSGSGTDFTLTINSLQPEDIGTYYCQQYESLPLTFGGGTKVEIK

SEQ ID NO: 7997 - protein, 108 aa, synthetic construct
  REGION 1..108: note = Description of Artificial Sequence: Synthetic polypeptide
ETTLTQSPATLSVSPGERATLSCRASQSVGSNLAWYQQKPGQGPRLLIYGASTRATGIPARFSGSGSGTEFTLTISSLQPEDFAVYYCQQYNDWLPVTFGQGTKVEIK

SEQ ID NO: 7998 - protein, 109 aa, synthetic construct
  REGION 1..109: note = Description of Artificial Sequence: Synthetic polypeptide
EIVLTQSPGTLSLSPGERATLSCRASQSIGSSSLAWYQQKPGQAPRLLMYGASSRASGIPDRFSGSGSGTDFTLTISRLEPEDFAVYYCQQYAGSPPFTFGQGTKVEIK

SEQ ID NO: 7999-8028 - skipped (30 entries)

SEQ ID NO: 8029 - protein, 243 aa, synthetic construct
  REGION 1..243: note = Description of Artificial Sequence: Synthetic polypeptide
QVQLQESGPGLVKPSETLSLTCTVSGGSISSSYYYWGWIRQPPGKGLEWIGSIYYSGSAYYNPSLKSRVTISVDTSKNQFSLRLSSVTAADTAVYYCARHWQEWPDAFDIWGQGTMVTVSSGGGGSGGGGSGGGGSETTLTQSPAFMSATPGDKVIISCKASQDIDDAMNWYQQKPGEAPLFIIQSATSPVPGIPPRFSGSGFGTDFSLTINNIESEDAAYYFCLQHDNFPLTFGQGTKLEIK

SEQ ID NO: 8030 - protein, 245 aa, synthetic construct
  REGION 1..245: note = Description of Artificial Sequence: Synthetic polypeptide
QVNLRESGPALVKPTQTLTLTCTFSGFSLRTSGMCVSWIRQPPGKALEWLARIDWDEDKFYSTSLKTRLTISKDTSDNQVVLRMTNMDPADTATYYCARSGAGGTSATAFDIWGPGTMVTVSSGGGGSGGGGSGGGGSDIQMTQSPSSLSASVGDRVTITCRASQDIYNNLAWFQLKPGSAPRSLMYAANKSQSGVPSRFSGSASGTDFTLTISSLQPEDFATYYCQHYYRFPYSFGQGTKLEIK

SEQ ID NO: 8031 - protein, 246 aa, synthetic construct
  REGION 1..246: note = Description of Artificial Sequence: Synthetic polypeptide
EVQLVESGGGLVKPGGSLRLSCAASGFTFSSYSMNWVRQAPGKGLEWVSSISSSSSYIYYADSVKGRFTISRDNAKNSLYLQMNSLRAEDTAVYYCAKTIAAVYAFDIWGQGTTVTVSSGGGGSGGGGSGGGGSEIVLTQSPLSLPVTPEEPASISCRSSQSLLHSNGYNYLDWYLQKPGQSPQLLIYLGSNRASGVPDRFSGSGSGTDFTLKISRVEAEDVGVYYCMQALQTPYTFGQGTKLEIK

SEQ ID NO: 8032 - protein, 240 aa, synthetic construct
  REGION 1..240: note = Description of Artificial Sequence: Synthetic polypeptide
EVQLVESGGGLVKPGGSLRLSCAASGFTFSDYYMSWIRQAPGKGLEWVSYISSSGSTIYYADSVKGRFTISRDNAKNSLYLQMNSLRAEDTAVYYCARDLRGAFDIWGQGTMVTVSSGGGGSGGGGSGGGGSSYVLTQSPSVSAAPGYTATISCGGNNIGTKSVHWYQQKPGQAPLLVIRDDSVRPSKIPGRFSGSNSGNMATLTISGVQAGDEADFYCQVWDSDSEHVVFGGGTKLTVL

SEQ ID NO: 8033 - protein, 241 aa, synthetic construct
  REGION 1..241: note = Description of Artificial Sequence: Synthetic polypeptide
QVQLVQSGAEVKKPGASVKVSCKPSGYTVTSHYIHWVRRAPGQGLEWMGMINPSGGVTAYSQTLQGRVTMTSDTSSSTVYMELSSLRSEDTAMYYCAREGSGSGWYFDFWGRGTLVTVSSGGGGSGGGGSGGGGSSYVLTQPPSVSVSPGQTASITCSGDGLSKKYVSWYQQKAGQSPVVLISRDKERPSGIPDRFSGSNSADTATLTISGTQAMDEADYYCQAWDDTTVVFGGGTKLTVL

SEQ ID NO: 8034 - protein, 245 aa, synthetic construct
  REGION 1..245: note = Description of Artificial Sequence: Synthetic polypeptide
QVQLQESGPGLVKPSQTLSLTCTVSGGSISSGGYYWSWIRQHPGKGLEWIGYIYYSGSTYYNPSLKSRVTISVDTSKNQFSLKLSSVTAADTAVYYCARAGIAARLRGAFDIWGQGTMVTVSSGGGGSGGGGSGGGGSDIVMTQSPSSVSASVGDRVIITCRASQGIRNWLAWYQQKPGKAPNLLIYAASNLQSGVPSRFSGSGSGADFTLTISSLQPEDVATYYCQKYNSAPFTFGPGTKVDIK

SEQ ID NO: 8035 - protein, 253 aa, synthetic construct
  REGION 1..253: note = Description of Artificial Sequence: Synthetic polypeptide
QVQLVQSGAEVKKPGSSVKVSCKASGGTFSSYAISWVRQAPGQGLEWMGGIIPIFGTANYAQKFQGRVTITADESTSTAYMELSSLRSEDTAVYYCARRGGYQLLRWDVGLLRSAFDIWGQGTMVTVSSGGGGSGGGGSGGGGSSYVLTQPPSVSVAPGQTARITCGGNNIGSKSVHWYQQKPGQAPVLVLYGKNNRPSGVPDRFSGSRSGTTASLTITGAQAEDEADYYCSSRDSSGDHLRVFGTGTKVTVL

SEQ ID NO: 8036 - protein, 248 aa, synthetic construct
  REGION 1..248: note = Description of Artificial Sequence: Synthetic polypeptide
EVQLQQSGPGLVKPSQTLSLTCAISGDSVSSNSAAWNWIRQSPSRGLEWLGRTYYRSKWYSFYAISLKSRIIINPDTSKNQFSLQLKSVTPEDTAVYYCARSSPEGLFLYWFDPWGQGTLVTVSSGGDGSGGGGSGGGGSSSELTQDPAVSVALGQTIRITCQGDSLGNYYATWYQQKPGQAPVLVIYGTNNRPSGIPDRFSASSSGNTASLTITGAQAEDEADYYCNSRDSSGHHLLFGTGTKVTVL

SEQ ID NO: 8037 - protein, 246 aa, synthetic construct
  REGION 1..246: note = Description of Artificial Sequence: Synthetic polypeptide
EVQLVESGGGLVQPGGSLRLSCAASGFTFSSYAMSWVRQAPGKGLEWVSAISGSGGSTYYADSVKGRFTISRDNSKNTLYLQMNSLRAEDTAVYYCAKVEGSGSLDYWGQGTLVTVSSGGGGSGGGGSGGGGSEIVMTQSPGTLSLSPGERATLSCRASQSVSSAYLAWYQQKPGQPPRLLISGASTRATGIPDRFGGSGSGTDFTLTISRLEPEDFAVYYCQHYGSSFNGSSLFTFGQGTRLEIK

SEQ ID NO: 8038 - protein, 241 aa, synthetic construct
  REGION 1..241: note = Description of Artificial Sequence: Synthetic polypeptide
EVQLVETGGGLVQPGGSLRLSCAASGITFSRYPMSWVRQAPGKGLEWVSGISDSGVSTYYADSAKGRFTISRDNSKNTLFLQMSSLRDEDTAVYYCVTRAGSEASDIWGQGTMVTVSSGGGGSGGGGSGGGGSEIVLTQSPATLSLSPGERATLSCRASQSVSNSLAWYQQKPGQAPRLLIYDASSRATGIPDRFSGSGSGTDFTLTISRLEPEDFAIYYCQQFGTSSGLTFGGGTKLEIK

SEQ ID NO: 8039 - protein, 248 aa, synthetic construct
  REGION 1..248: note = Description of Artificial Sequence: Synthetic polypeptide
QVQLVESGGGLVQPGGSLRLSCAASGFTFSSYAMSWVRQAPGKGLEWVSAISGSGGSTYYADSVKGRFTISRDNAKNSLYLQMNSLRAEDTAIYYCARATYKRELRYYYGMDVWGQGTMVTVSSGGGGSGGGGSGGGGSEIVMTQSPGTVSLSPGERATLSCRASQSVSSSFLAWYQQKPGQAPRLLIYGASSRATGIPDRFSGSGSGTDFTLTISRLEPEDSAVYYCQQYHSSPSWTFGQGTRLEIK

SEQ ID NO: 8040 - protein, 248 aa, synthetic construct
  REGION 1..248: note = Description of Artificial Sequence: Synthetic polypeptide
EVQLVETGGGLVQPGGSLRLSCAASGFTFSSYAMSWVRQAPGKGLEWVSAISGSGGSTYYADSVKGRFTISRDNSKNTLYLQMNTLKAEDTAVYYCARATYKRELRYYYGMDVWGQGTTVTVSSGGGGSGGGGSGGGGSEIVLTQSPSTLSLSPGESATLSCRASQSVSTTFLAWYQQKPGQAPRLLIYGSSNRATGIPDRFSGSGSGTDFTLTIRRLEPEDFAVYYCQQYHSSPSWTFGQGTKVEIK

SEQ ID NO: 8041 - protein, 239 aa, synthetic construct
  REGION 1..239: note = Description of Artificial Sequence: Synthetic polypeptide
EVQLVETGGGLVQPGRSLRLSCAASGFTFDDYAMHWVRQAPGKGLEWVSGISWNSGSIGYADSVKGRFTISRDNAKNSLYLQMNSLRDEDTAVYYCARVGKAVPDVWGQGTTVTVSSGGGGSGGGGSGGGGSDIVMTQTPSSLSASVGDRVTITCRASQSISSYLNWYQQKPGKAPKLLIYAASSLQSGVPSRFSGSGSGTDFTLTISSLQPEDFATYYCQQSYSTPYSFGQGTRLEIK

SEQ ID NO: 8042 - protein, 246 aa, synthetic construct
  REGION 1..246: note = Description of Artificial Sequence: Synthetic polypeptide
EVQLVESGGGLVQPGRSLRLSCTASGFTFDDYAMHWVRQRPGKGLEWVASINWKGNSLAYGDSVKGRFAISRDNAKNTVFLQMNSLRTEDTAVYYCASHQGVAYYNYAMDVWGRGTLVTVSSGGGGSGGGGSGGGGSEIVLTQSPGTLSLSPGERATLSCRATQSIGSSFLAWYQQRPGQAPRLLIYGASQRATGIPDRFSGRGSGTDFTLTISRVEPEDSAVYYCQHYESSPSWTFGQGTKVEIK

SEQ ID NO: 8043 - protein, 241 aa, synthetic construct
  REGION 1..241: note = Description of Artificial Sequence: Synthetic polypeptide
EVQLVESGGGLVQPGGSLRLSCAASGFTFSSYAMSWVRQAPGKGLEWVSAISGSGGSTYYADSVKGRFTISRDNSKNTLYLQMNSLRAEDTAVYYCAKVVRDGMDVWGQGTTVTVSSGGGGSGGGGSGGGGSEIVLTQSPATLSLSPGERATLSCRASQSVSSSYLAWYQQKPGQAPRLLIYGASSRATGIPDRFSGNGSGTDFTLTISRLEPEDFAVYYCQQYGSPPRFTFGPGTKVDIK

SEQ ID NO: 8044 - protein, 242 aa, synthetic construct
  REGION 1..242: note = Description of Artificial Sequence: Synthetic polypeptide
EVQLLESGGGLVQPGGSLRLSCAASGFTFSSYAMSWVRQAPGKGLEWVSAISGSGGSTYYADSVKGRFTISRDNSKNTLYLQMNSLRAEDTAVYYCAKIPQTGTFDYWGQGTLVTVSSGGGGSGGGGSGGGGSEIVLTQSPGTLSLSPGERATLSCRASQSVSSSYLAWYQQRPGQAPRLLIYGASSRATGIPDRFSGSGSGTDFTLTISRLEPEDFAVYYCQHYGSSPSWTFGQGTRLEIK

SEQ ID NO: 8045 - protein, 248 aa, synthetic construct
  REGION 1..248: note = Description of Artificial Sequence: Synthetic polypeptide
EVQLVETGGGLVQPGGSLRLSCAASGFTFSSYAMSWVRQAPGKGLEWVSAISGSGGSTYYADSVKGRFTMSRENDKNSVFLQMNSLRVEDTGVYYCARANYKRELRYYYGMDVWGQGTMVTVSSGGGGSGGGGSGGGGSEIVMTQSPGTLSLSPGESATLSCRASQRVASNYLAWYQHKPGQAPSLLISGASSRATGVPDRFSGSGSGTDFTLAISRLEPEDSAVYYCQHYDSSPSWTFGQGTKVEIK

SEQ ID NO: 8046 - protein, 244 aa, synthetic construct
  REGION 1..244: note = Description of Artificial Sequence: Synthetic polypeptide
EVQLLETGGGLVQPGGSLRLSCAASGFSFSSYAMSWVRQAPGKGLEWVSAISGSGGSTYYADSVKGRFTISRDNSKNTLYLQMNSLRAEDTAVYYCAKALVGATGAFDIWGQGTLVTVSSGGGGSGGGGSGGGGSEIVLTQSPGTLSLSPGERATLSCRASQSLSSNFLAWYQQKPGQAPGLLIYGASNWATGTPDRFSGSGSGTDFTLTITRLEPEDFAVYYCQYYGTSPMYTFGQGTKVEIK

SEQ ID NO: 8047 - protein, 244 aa, synthetic construct
  REGION 1..244: note = Description of Artificial Sequence: Synthetic polypeptide
EVQLLESGGGLVQPGGSLRLSCAASGFTFSSYAMSWVRQAPGKGLEWVSAISGSGGSTYYADSVKGRFTISRDNSKNTLYLQMNSLRAEDTAVYYCVLWFGEGFDPWGQGTLVTVSSGGGGSGGGGSGGGGSDIVLTQSPLSLPVTPGEPASISCRSSQSLLHSNGYNYLDWYLQKPGQSPQLLIYLGSNRASGVPDRFSGSGSGTDFTLKISRVEAEDVGVYYCMQALQTPLTFGGGTKVDIK

SEQ ID NO: 8048 - protein, 251 aa, synthetic construct
  REGION 1..251: note = Description of Artificial Sequence: Synthetic polypeptide
QVQLVESGGGLVQPGGSLRLSCAASGFTFSSYAMSWVRQAPGKGLEWVSAISGSGGSTYYADSVKGRFTISRDNSKNTLYLQMNSLRAEDTAVYYCAKVGYDSSGYYRDYYGMDVWGQGTTVTVSSGGGGSGGGGSGGGGSEIVLTQSPGTLSLSPGERATLSCRASQSVSSSYLAWYQQKPGQAPRLLIYGTSSRATGISDRFSGSGSGTDFTLTISRLEPEDFAVYYCQHYGNSPPKFTFGPGTKLEIK

SEQ ID NO: 8049 - protein, 246 aa, synthetic construct
  REGION 1..246: note = Description of Artificial Sequence: Synthetic polypeptide
EVQLVESGGGLVQPGGSLRLSCAASGFTFSSYAMSWVRQAPGKGLEWVSAISGSGGSTYYADSVKGRFTISRDNSKNTLYLQMNSLRAEDTAVYYCAKMGWSSGYLGAFDIWGQGTTVTVSSGGGGSGGGGSGGGGSEIVLTQSPGTLSLSPGERATLSCRASQSVASSFLAWYQQKPGQAPRLLIYGASGRATGIPDRFSGSGSGTDFTLTISRLEPEDFAVYYCQHYGGSPRLTFGGGTKVDIK

SEQ ID NO: 8050 - DNA, 729 bp, synthetic construct
  misc_feature 1..729: note = Description of Artificial Sequence: Synthetic polynucleotide
  source 1..729: mol_type = other DNA
caagtgcagcttcaggaaagcggaccgggcctggtcaagccatccgaaactctctccctgacttgcactgtgtctggcggttccatctcatcgtcgtactactactggggctggattaggcagccgcccggaaagggactggagtggatcggaagcatctactattccggctcggcgtactacaaccctagcctcaagtcgagagtgaccatctccgtggatacctccaagaaccagttttccctgcgcctgagctccgtgaccgccgctgacaccgccgtgtactactgtgctcggcattggcaggaatggcccgatgccttcgacatttggggccagggcactatggtcactgtgtcatccgggggtggaggcagcgggggaggagggtccggggggggaggttcagagacaaccttgacccagtcacccgcattcatgtccgccactccgggagacaaggtcatcatctcgtgcaaagcgtcccaggatatcgacgatgccatgaattggtaccagcagaagcctggcgaagcgccgctgttcattatccaatccgcaacctcgcccgtgcctggaatcccaccgcggttcagcggcagcggtttcggaaccgacttttccctgaccattaacaacattgagtccgaggacgccgcctactacttctgcctgcaacacgacaacttccctctcacgttcggccagggaaccaagctggaaatcaag

SEQ ID NO: 8051 - DNA, 735 bp, synthetic construct
  misc_feature 1..735: note = Description of Artificial Sequence: Synthetic polynucleotide
  source 1..735: mol_type = other DNA
caagtcaatctgcgcgaatccggccccgccttggtcaagcctacccagaccctcactctgacctgtactttctccggcttctccctgcggacttccgggatgtgcgtgtcctggatcagacagcctccgggaaaggccctggagtggctcgctcgcattgactgggatgaggacaagttctactccacctcactcaagaccaggctgaccatcagcaaagatacctctgacaaccaagtggtgctccgcatgaccaacatggacccagccgacactgccacttactactgcgcgaggagcggagcgggcggaacctccgccaccgccttcgatatttggggcccgggtaccatggtcaccgtgtcaagcggaggaggggggtccgggggcggcggttccgggggaggcggatcggacattcagatgactcagtcaccatcgtccctgagcgctagcgtgggcgacagagtgacaatcacttgccgggcatcccaggacatctataacaaccttgcgtggttccagctgaagcctggttccgcaccgcggtcacttatgtacgccgccaacaagagccagtcgggagtgccgtcccggttttccggttcggcctcgggaactgacttcaccctgacgatctccagcctgcaacccgaggatttcgccacctactactgccagcactactaccgctttccctactcgttcggacagggaaccaagctggaaatcaag

SEQ ID NO: 8052 - DNA, 738 bp, synthetic construct
  misc_feature 1..738: note = Description of Artificial Sequence: Synthetic polynucleotide
  source 1..738: mol_type = other DNA
gaagtgcagcttgtcgaatccggggggggactggtcaagccgggcggatcactgagactgtcctgcgccgcgagcggcttcacgttctcctcctactccatgaactgggtccgccaagcccccgggaagggactggaatgggtgtcctctatctcctcgtcgtcgtcctacatctactacgccgactccgtgaagggaagattcaccatttcccgcgacaacgcaaagaactcactgtacttgcaaatgaactcactccgggccgaagatactgctgtgtactattgcgccaagactattgccgccgtctacgctttcgacatctggggccagggaaccaccgtgactgtgtcgtccggtggtggtggctcgggcggaggaggaagcggcggcggggggtccgagattgtgctgacccagtcgccactgagcctccctgtgacccccgaggaacccgccagcatcagctgccggtccagccagtccctgctccactccaacggatacaattacctcgattggtaccttcagaagcctggacaaagcccgcagctgctcatctacttgggatcaaaccgcgcgtcaggagtgcctgaccggttctccggctcgggcagcggtaccgatttcaccctgaaaatctccagggtggaggcagaggacgtgggagtgtattactgtatgcaggcgctgcagactccgtacacatttgggcagggcaccaagctggagatcaag

SEQ ID NO: 8053 - DNA, 720 bp, synthetic construct
  misc_feature 1..720: note = Description of Artificial Sequence: Synthetic polynucleotide
  source 1..720: mol_type = other DNA
gaagtccagctcgtggagtccggcggaggccttgtgaagcctggaggttcgctgagactgtcctgcgccgcctccggcttcaccttctccgactactacatgtcctggatcagacaggccccgggaaagggcctggaatgggtgtcctacatctcgtcatcgggcagcactatctactacgcggactcagtgaaggggcggttcaccatttcccgggataacgcgaagaactcgctgtatctgcaaatgaactcactgagggccgaggacaccgccgtgtactactgcgcccgcgatctccgcggggcatttgacatctggggacagggaaccatggtcacagtgtccagcggagggggaggatcgggtggcggaggttccgggggtggaggctcctcctacgtgctgactcagagcccaagcgtcagcgctgcgcccggttacacggcaaccatctcctgtggcggaaacaacattgggaccaagtctgtgcactggtatcagcagaagccgggccaagctcccctgttggtgatccgcgatgactccgtgcggcctagcaaaattccgggacggttctccggctccaacagcggcaatatggccactctcaccatctcgggagtgcaggccggagatgaagccgacttctactgccaagtctgggactcagactccgagcatgtggtgttcgggggcggaaccaagctgactgtgctc

SEQ ID NO: 8054 - DNA, 723 bp, synthetic construct
  misc_feature 1..723: note = Description of Artificial Sequence: Synthetic polynucleotide
  source 1..723: mol_type = other DNA
caagtgcagctggtgcagagcggggccgaagtcaagaagccgggagcctccgtgaaagtgtcctgcaagccttcgggatacaccgtgacctcccactacattcattgggtccgccgcgcccccggccaaggactcgagtggatgggcatgatcaaccctagcggcggagtgaccgcgtacagccagacgctgcagggacgcgtgactatgacctcggatacctcctcctccaccgtctatatggaactgtccagcctgcggtccgaggataccgccatgtactactgcgcccgggaaggatcaggctccgggtggtatttcgacttctggggaagaggcaccctcgtgactgtgtcatctgggggagggggttccggtggtggcggatcgggaggaggcggttcatcctacgtgctgacccagccaccctccgtgtccgtgagccccggccagactgcatcgattacatgtagcggcgacggcctctccaagaaatacgtgtcgtggtaccagcagaaggccggacagagcccggtggtgctgatctcaagagataaggagcggcctagcggaatcccggacaggttctcgggttccaactccgcggacactgctactctgaccatctcggggacccaggctatggacgaagccgattactactgccaagcctgggacgacactactgtcgtgtttggagggggcaccaagttgaccgtcctt

SEQ ID NO: 8055 - DNA, 735 bp, synthetic construct
  misc_feature 1..735: note = Description of Artificial Sequence: Synthetic polynucleotide
  source 1..735: mol_type = other DNA
caagtgcagcttcaggagagcggcccgggactcgtgaagccgtcccagaccctgtccctgacttgcaccgtgtcgggaggaagcatctcgagcggaggctactattggtcgtggattcggcagcaccctggaaagggcctggaatggatcggctacatctactactccggctcgacctactacaacccatcgctgaagtccagagtgacaatctcagtggacacgtccaagaatcagttcagcctgaagctctcttccgtgactgcggccgacaccgccgtgtactactgcgcacgcgctggaattgccgcccggctgaggggtgccttcgacatttggggacagggcaccatggtcaccgtgtcctccggcggcggaggttccgggggtggaggctcaggaggaggggggtccgacatcgtcatgactcagtcgccctcaagcgtcagcgcgtccgtcggggacagagtgatcatcacctgtcgggcgtcccagggaattcgcaactggctggcctggtatcagcagaagcccggaaaggcccccaacctgttgatctacgccgcctcaaacctccaatccggggtgccgagccgcttcagcggctccggttcgggtgccgatttcactctgaccatctcctccctgcaacctgaagatgtggctacctactactgccaaaagtacaactccgcaccttttactttcggaccggggaccaaagtggacattaag

SEQ ID NO: 8056 - DNA, 759 bp, synthetic construct
  misc_feature 1..759: note = Description of Artificial Sequence: Synthetic polynucleotide
  source 1..759: mol_type = other DNA
caagtgcagctggtccagtcgggcgccgaggtcaagaagcccgggagctctgtgaaagtgtcctgcaaggcctccgggggcacctttagctcctacgccatctcctgggtccgccaagcaccgggtcaaggcctggagtggatggggggaattatccctatcttcggcactgccaactacgcccagaagttccagggacgcgtgaccattaccgcggacgaatccacctccaccgcttatatggagctgtccagcttgcgctcggaagataccgccgtgtactactgcgcccggaggggtggataccagctgctgagatgggacgtgggcctcctgcggtcggcgttcgacatctggggccagggcactatggtcactgtgtccagcggaggaggcggatcgggaggcggcggatcagggggaggcggttccagctacgtgcttactcaacccccttcggtgtccgtggccccgggacagaccgccagaatcacttgcggaggaaacaacattgggtccaagagcgtgcattggtaccagcagaagccaggacaggcccctgtgctggtgctctacgggaagaacaatcggcccagcggagtgccggacaggttctcgggttcacgctccggtacaaccgcttcactgactatcaccggggcccaggcagaggatgaagcggactactactgttcctcccgggattcatccggcgaccacctccgggtgttcggaaccggaacgaaggtcaccgtgctg

SEQ ID NO: 8057 - DNA, 744 bp, synthetic construct
  misc_feature 1..744: note = Description of Artificial Sequence: Synthetic polynucleotide
  source 1..744: mol_type = other DNA
gaagtgcagctccaacagtcaggaccggggctcgtgaagccatcccagaccctgtccctgacttgtgccatctcgggagatagcgtgtcatcgaactccgccgcctggaactggattcggcagagcccgtcccgcggactggagtggcttggaaggacctactaccggtccaagtggtactctttctacgcgatctcgctgaagtcccgcattatcattaaccctgatacctccaagaatcagttctccctccaactgaaatccgtcacccccgaggacacagcagtgtattactgcgcacggagcagccccgaaggactgttcctgtattggtttgacccctggggccaggggactcttgtgaccgtgtcgagcggcggagatgggtccggtggcggtggttcggggggcggcggatcatcatccgaactgacccaggacccggctgtgtccgtggcgctgggacaaaccatccgcattacgtgccagggagactccctgggcaactactacgccacttggtaccagcagaagccgggccaagcccctgtgttggtcatctacgggaccaacaacagaccttccggcatccccgaccggttcagcgcttcgtcctccggcaacactgccagcctgaccatcactggagcgcaggccgaagatgaggccgactactactgcaacagcagagactcctcgggtcatcacctcttgttcggaactggaaccaaggtcaccgtgctg

SEQ ID NO: 8058 - DNA, 738 bp, synthetic construct
  misc_feature 1..738: note = Description of Artificial Sequence: Synthetic polynucleotide
  source 1..738: mol_type = other DNA
gaagtgcagctcgtggagtcaggaggcggcctggtccagccgggagggtcccttagactgtcatgcgccgcaagcggattcactttctcctcctatgccatgagctgggtccgccaagcccccggaaagggactggaatgggtgtccgccatctcggggtctggaggctcaacttactacgctgactccgtgaagggacggttcaccattagccgcgacaactccaagaacaccctctacctccaaatgaactccctgcgggccgaggataccgccgtctactactgcgccaaagtggaaggttcaggatcgctggactactggggacagggtactctcgtgaccgtgtcatcgggcggaggaggttccggcggtggcggctccggcggcggagggtcggagatcgtgatgacccagagccctggtactctgagcctttcgccgggagaaagggccaccctgtcctgccgcgcttcccaatccgtgtcctccgcgtacttggcgtggtaccagcagaagccgggacagccccctcggctgctgatcagcggggccagcacccgggcaaccggaatcccagacagattcgggggttccggcagcggcacagatttcaccctgactatttcgaggttggagcccgaggactttgcggtgtattactgtcagcactacgggtcgtcctttaatggctccagcctgttcacgttcggacaggggacccgcctggaaatcaag

SEQ ID NO: 8059 - DNA, 723 bp, synthetic construct
  misc_feature 1..723: note = Description of Artificial Sequence: Synthetic polynucleotide
  source 1..723: mol_type = other DNA
gaagtgcaactggtggaaaccggtggcggcctggtgcagcctggaggatcattgaggctgtcatgcgcggccagcggtattaccttctcccggtaccccatgtcctgggtcagacaggccccggggaaagggcttgaatgggtgtccgggatctcggactccggtgtcagcacttactacgccgactccgccaagggacgcttcaccatttcccgggacaactcgaagaacaccctgttcctccaaatgagctccctccgggacgaggatactgcagtgtactactgcgtgacccgcgccgggtccgaggcgtctgacatttggggacagggcactatggtcaccgtgtcgtccggcggagggggctcgggaggcggtggcagcggaggaggagggtccgagatcgtgctgacccaatccccggccaccctctcgctgagccctggagaaagggcaaccttgtcctgtcgcgcgagccagtccgtgagcaactccctggcctggtaccagcagaagcccggacaggctccgagacttctgatctacgacgcttcgagccgggccactggaatccccgaccgcttttcggggtccggctcaggaaccgatttcaccctgacaatctcacggctggagccagaggatttcgccatctattactgccagcagttcggtacttcctccggcctgactttcggaggcggcacgaagctcgaaatcaag

SEQ ID NO: 8060 - DNA, 744 bp, synthetic construct
  misc_feature 1..744: note = Description of Artificial Sequence: Synthetic polynucleotide
  source 1..744: mol_type = other DNA
caagtgcagctcgtggaatcgggtggcggactggtgcagccggggggctcacttagactgtcctgcgcggccagcggattcactttctcctcctacgccatgtcctgggtcagacaggcccctggaaagggcctggaatgggtgtccgcaatcagcggcagcggcggctcgacctattacgcggattcagtgaagggcagattcaccatttcccgggacaacgccaagaactccttgtaccttcaaatgaactccctccgcgcggaagataccgcaatctactactgcgctcgggccacttacaagagggaactgcgctactactacgggatggacgtctggggccagggaaccatggtcaccgtgtccagcggaggaggaggatcgggaggaggcggtagcgggggtggagggtcggagatcgtgatgacccagtcccccggcactgtgtcgctgtcccccggcgaacgggccaccctgtcatgtcgggccagccagtcagtgtcgtcaagcttcctcgcctggtaccagcagaaaccgggacaagctccccgcctgctgatctacggagccagcagccgggccaccggtattcctgaccggttctccggttcggggtccgggaccgactttactctgactatctctcgcctcgagccagaggactccgccgtgtattactgccagcagtaccactcctccccgtcctggacgttcggacagggcacaaggctggagattaag

SEQ ID NO: 8061 - DNA, 744 bp, synthetic construct
  misc_feature 1..744: note = Description of Artificial Sequence: Synthetic polynucleotide
  source 1..744: mol_type = other DNA
gaggtgcagcttgtggaaaccggtggcggactggtgcagcccggaggaagcctcaggctgtcctgcgccgcgtccggcttcaccttctcctcgtacgccatgtcctgggtccgccaggcccccggaaagggcctggaatgggtgtccgccatctctggaagcggaggttccacgtactacgcggacagcgtcaagggaaggttcacaatctcccgcgataattcgaagaacactctgtaccttcaaatgaacaccctgaaggccgaggacactgctgtgtactactgcgcacgggccacctacaagagagagctccggtactactacggaatggacgtctggggccagggaactactgtgaccgtgtcctcgggagggggtggctccggggggggcggctccggcggaggcggttccgagattgtgctgacccagtcaccttcaactctgtcgctgtccccgggagagagcgctactctgagctgccgggccagccagtccgtgtccaccaccttcctcgcctggtatcagcagaagccggggcaggcaccacggctcttgatctacgggtcaagcaacagagcgaccggaattcctgaccgcttctcggggagcggttcaggcaccgacttcaccctgactatccggcgcctggaacccgaagatttcgccgtgtattactgtcaacagtaccactcctcgccgtcctggacctttggccaaggaaccaaagtggaaatcaag

SEQ ID NO: 8062 - DNA, 717 bp, synthetic construct
  misc_feature 1..717: note = Description of Artificial Sequence: Synthetic polynucleotide
  source 1..717: mol_type = other DNA
gaagtgcagctcgtggaaactggaggtggactcgtgcagcctggacggtcgctgcggctgagctgcgctgcatccggcttcaccttcgacgattatgccatgcactgggtcagacaggcgccagggaagggacttgagtgggtgtccggtatcagctggaatagcggctcaatcggatacgcggactccgtgaagggaaggttcaccatttcccgcgacaacgccaagaactccctgtacttgcaaatgaacagcctccgggatgaggacactgccgtgtactactgcgcccgcgtcggaaaagctgtgcccgacgtctggggccagggaaccactgtgaccgtgtccagcggcgggggtggatcgggcggtggagggtccggtggagggggctcagatattgtgatgacccagaccccctcgtccctgtccgcctcggtcggcgaccgcgtgactatcacatgtagagcctcgcagagcatctccagctacctgaactggtatcagcagaagccggggaaggccccgaagctcctgatctacgcggcatcatcactgcaatcgggagtgccgagccggttttccgggtccggctccggcaccgacttcacgctgaccatttcttccctgcaacccgaggacttcgccacttactactgccagcagtcctactccaccccttactccttcggccaaggaaccaggctggaaatcaag

SEQ ID NO: 8063 - DNA, 738 bp, synthetic construct
  misc_feature 1..738: note = Description of Artificial Sequence: Synthetic polynucleotide
  source 1..738: mol_type = other DNA
gaagtgcagctcgtggagagcgggggaggattggtgcagcccggaaggtccctgcggctctcctgcactgcgtctggcttcaccttcgacgactacgcgatgcactgggtcagacagcgcccgggaaagggcctggaatgggtcgcctcaatcaactggaagggaaactccctggcctatggcgacagcgtgaagggccgcttcgccatttcgcgcgacaacgccaagaacaccgtgtttctgcaaatgaattccctgcggaccgaggataccgctgtgtactactgcgccagccaccagggcgtggcatactataactacgccatggacgtgtggggaagagggacgctcgtcaccgtgtcctccgggggcggtggatcgggtggaggaggaagcggtggcgggggcagcgaaatcgtgctgactcagagcccgggaactctttcactgtccccgggagaacgggccactctctcgtgccgggccacccagtccatcggctcctccttccttgcctggtaccagcagaggccaggacaggcgccccgcctgctgatctacggtgcttcccaacgcgccactggcattcctgaccggttcagcggcagagggtcgggaaccgatttcacactgaccatttcccgggtggagcccgaagattcggcagtctactactgtcagcattacgagtcctccccttcatggaccttcggtcaagggaccaaagtggagatcaag

SEQ ID NO: 8064 - DNA, 723 bp, synthetic construct
  misc_feature 1..723: note = Description of Artificial Sequence: Synthetic polynucleotide
  source 1..723: mol_type = other DNA
gaggtgcagttggtcgaaagcgggggcgggcttgtgcagcctggcggatcactgcggctgtcctgcgcggcatcaggcttcacgttttcttcctacgccatgtcctgggtgcgccaggcccctggaaagggactggaatgggtgtccgcgatttcggggtccggcgggagcacctactacgccgattccgtgaagggccgcttcactatctcgcgggacaactccaagaacaccctctacctccaaatgaatagcctgcgggccgaggataccgccgtctactattgcgctaaggtcgtgcgcgacggaatggacgtgtggggacagggtaccaccgtgacagtgtcctcggggggaggcggtagcggcggaggaggaagcggtggtggaggttccgagattgtgctgactcaatcacccgcgaccctgagcctgtcccccggcgaaagggccactctgtcctgtcgggccagccaatcagtctcctcctcgtacctggcctggtaccagcagaagccaggacaggctccgagactccttatctatggcgcatcctcccgcgccaccggaatcccggataggttctcgggaaacggatcggggaccgacttcactctcaccatctcccggctggaaccggaggacttcgccgtgtactactgccagcagtacggcagcccgcctagattcactttcggccccggcaccaaagtggacatcaag

SEQ ID NO: 8065 - DNA, 726 bp, synthetic construct
  misc_feature 1..726: note = Description of Artificial Sequence: Synthetic polynucleotide
  source 1..726: mol_type = other DNA
gaagtgcagctgctggagtccggcggtggattggtgcaaccggggggatcgctcagactgtcctgtgcggcgtcaggcttcaccttctcgagctacgccatgtcatgggtcagacaggcccctggaaagggtctggaatgggtgtccgccatttccgggagcgggggatctacatactacgccgatagcgtgaagggccgcttcaccatttcccgggacaactccaagaacactctctatctgcaaatgaactccctccgcgctgaggacactgccgtgtactactgcgccaaaatccctcagaccggcaccttcgactactggggacaggggactctggtcaccgtcagcagcggtggcggaggttcggggggaggaggaagcggcggcggagggtccgagattgtgctgacccagtcacccggcactttgtccctgtcgcctggagaaagggccaccctttcctgccgggcatcccaatccgtgtcctcctcgtacctggcctggtaccagcagaggcccggacaggccccacggcttctgatctacggagcaagcagccgcgcgaccggtatcccggaccggttttcgggctcgggctcaggaactgacttcaccctcaccatctcccgcctggaacccgaagatttcgctgtgtattactgccagcactacggcagctccccgtcctggacgttcggccagggaactcggctggagatcaag

SEQ ID NO: 8066 - DNA, 744 bp, synthetic construct
  misc_feature 1..744: note = Description of Artificial Sequence: Synthetic polynucleotide
  source 1..744: mol_type = other DNA
gaagtgcaactggtggaaaccggtggaggactcgtgcagcctggcggcagcctccggctgagctgcgccgcttcgggattcaccttttcctcctacgcgatgtcttgggtcagacaggcccccggaaaggggctggaatgggtgtcagccatctccggctccggcggatcaacgtactacgccgactccgtgaaaggccggttcaccatgtcgcgcgagaatgacaagaactccgtgttcctgcaaatgaactccctgagggtggaggacaccggagtgtactattgtgcgcgcgccaactacaagagagagctgcggtactactacggaatggacgtctggggacagggaactatggtgaccgtgtcatccggtggagggggaagcggcggtggaggcagcgggggcgggggttcagaaattgtcatgacccagtccccgggaactctttccctctcccccggggaatccgcgactttgtcctgccgggccagccagcgcgtggcctcgaactacctcgcatggtaccagcataagccaggccaagccccttccctgctgatttccggggctagcagccgcgccactggcgtgccggataggttctcgggaagcggctcgggtaccgatttcaccctggcaatctcgcggctggaaccggaggattcggccgtgtactactgccagcactatgactcatccccctcctggacattcggacagggcaccaaggtcgagatcaag

SEQ ID NO: 8067 - DNA, 732 bp, synthetic construct
  misc_feature 1..732: note = Description of Artificial Sequence: Synthetic polynucleotide
  source 1..732: mol_type = other DNA
gaagtgcagctgctcgaaaccggtggagggctggtgcagccagggggctccctgaggctttcatgcgccgctagcggattctccttctcctcttacgccatgtcgtgggtccgccaagcccctggaaaaggcctggaatgggtgtccgcgatttccgggagcggaggttcgacctattacgccgactccgtgaagggccgctttaccatctcccgggataactccaagaacactctgtacctccaaatgaactcgctgagagccgaggacaccgccgtgtattactgcgcgaaggcgctggtcggcgcgactggggcattcgacatctggggacagggaactcttgtgaccgtgtcgagcggaggcggcggctccggcggaggagggagcgggggcggtggttccgaaatcgtgttgactcagtccccgggaaccctgagcttgtcacccggggagcgggccactctctcctgtcgcgcctcccaatcgctctcatccaatttcctggcctggtaccagcagaagcccggacaggccccgggcctgctcatctacggcgcttcaaactgggcaacgggaacccctgatcggttcagcggaagcggatcgggtactgactttaccctgaccatcaccagactggaaccggaggacttcgccgtgtactactgccagtactacggcacctcccccatgtacacattcggacagggtaccaaggtcgagattaag

SEQ ID NO: 8068 - DNA, 733 bp, synthetic construct
  misc_feature 1..733: note = Description of Artificial Sequence: Synthetic polynucleotide
  source 1..733: mol_type = other DNA
gaagtgcagctgcttgagagcggtggaggtctggtgcagcccgggggatcactgcgcctgtcctgtgccgcgtccggtttcactttctcctcgtacgccatgtcgtgggtcagacaggcaccgggaaagggactggaatgggtgtcagccatttcgggttcggggggcagcacctactacgctgactccgtgaagggccggttcaccatttcccgcgacaactccaagaacaccttgtacctccaaatgaactccctgcgggccgaagataccgccgtgtattactgcgtgctgtggttcggagagggattcgacccgtggggacaaggaacactcgtgactgtgtcatccggcggaggcggcagcggtggcggcggttccggcggcggcggatctgacatcgtgttgacccagtcccctctgagcctgccggtcactcctggcgaaccagccagcatctcctgccggtcgagccagtccctcctgcactccaatgggtacaactacctcgattggtatctgcaaaagccgggccagagcccccagctgctgatctaccttgggtcaaaccgcgcttccggggtgcctgatagattctccgggtccgggagcggaaccgactttaccctgaaaatctcgagggtggaggccgaggacgtcggagtgtactactgcatgcaggcgctccagactcccctgaccttcggaggaggaacgaaggtcgacatcaaga

SEQ ID NO: 8069 - DNA, 753 bp, synthetic construct
  misc_feature 1..753: note = Description of Artificial Sequence: Synthetic polynucleotide
  source 1..753: mol_type = other DNA
caagtgcagctcgtggagtcaggcggaggactggtgcagcccgggggctccctgagactttcctgcgcggcatcgggttttaccttctcctcctatgctatgtcctgggtgcgccaggccccgggaaagggactggaatgggtgtccgcaatcagcggtagcgggggctcaacatactacgccgactccgtcaagggtcgcttcactatttcccgggacaactccaagaataccctgtacctccaaatgaacagcctcagggccgaggatactgccgtgtactactgcgccaaagtcggatacgatagctccggttactaccgggactactacggaatggacgtgtggggacagggcaccaccgtgaccgtgtcaagcggcggaggcggttcaggagggggaggctccggcggtggagggtccgaaatcgtcctgactcagtcgcctggcactctgtcgttgtccccgggggagcgcgctaccctgtcgtgtcgggcgtcgcagtccgtgtcgagctcctacctcgcgtggtaccagcagaagcccggacaggcccctagacttctgatctacggcacttcttcacgcgccaccgggatcagcgacaggttcagcggctccggctccgggaccgacttcaccctgaccattagccggctggagcctgaagatttcgccgtgtattactgccaacactacggaaactcgccgccaaagttcacgttcggacccggaaccaagctggaaatcaag

SEQ ID NO: 8070 - DNA, 739 bp, synthetic construct
  misc_feature 1..739: note = Description of Artificial Sequence: Synthetic polynucleotide
  source 1..739: mol_type = other DNA
gaagtccaactggtggagtccgggggagggctcgtgcagcccggaggcagccttcggctgtcgtgcgccgcctccgggttcacgttctcatcctacgcgatgtcgtgggtcagacaggcaccaggaaagggactggaatgggtgtccgccattagcggctccggcggtagcacctactatgccgactcagtgaagggaaggttcactatctcccgcgacaacagcaagaacaccctgtacctccaaatgaactctctgcgggccgaggataccgcggtgtactattgcgccaagatgggttggtccagcggatacttgggagccttcgacatttggggacagggcactactgtgaccgtgtcctccgggggtggcggatcgggaggcggcggctcgggtggagggggttccgaaatcgtgttgacccagtcaccgggaaccctctcgctgtccccgggagaacgggctacactgtcatgtagagcgtcccagtccgtggcttcctcgttcctggcctggtaccagcagaagccgggacaggcaccccgcctgctcatctacggagccagcggccgggcgaccggcatccctgaccgcttctccggttccggctcgggcaccgactttactctgaccattagcaggcttgagcccgaggattttgccgtgtactactgccaacactacggggggagccctcgcctgaccttcggaggcggaactaaggtcgatatcaaaa

SEQ ID NO: 8071 - protein, 121 aa, synthetic construct
  REGION 1..121: note = Description of Artificial Sequence: Synthetic polypeptide
QVQLQESGPGLVKPSETLSLTCTVSGGSISSSYYYWGWIRQPPGKGLEWIGSIYYSGSAYYNPSLKSRVTISVDTSKNQFSLRLSSVTAADTAVYYCARHWQEWPDAFDIWGQGTMVTVSS

SEQ ID NO: 8072 - protein, 123 aa, synthetic construct
  REGION 1..123: note = Description of Artificial Sequence: Synthetic polypeptide
QVNLRESGPALVKPTQTLTLTCTFSGFSLRTSGMCVSWIRQPPGKALEWLARIDWDEDKFYSTSLKTRLTISKDTSDNQVVLRMTNMDPADTATYYCARSGAGGTSATAFDIWGPGTMVTVSS

SEQ ID NO: 8073 - protein, 119 aa, synthetic construct
  REGION 1..119: note = Description of Artificial Sequence: Synthetic polypeptide
EVQLVESGGGLVKPGGSLRLSCAASGFTFSSYSMNWVRQAPGKGLEWVSSISSSSSYIYYADSVKGRFTISRDNAKNSLYLQMNSLRAEDTAVYYCAKTIAAVYAFDIWGQGTTVTVSS

SEQ ID NO: 8074 - protein, 117 aa, synthetic construct
  REGION 1..117: note = Description of Artificial Sequence: Synthetic polypeptide
EVQLVESGGGLVKPGGSLRLSCAASGFTFSDYYMSWIRQAPGKGLEWVSYISSSGSTIYYADSVKGRFTISRDNAKNSLYLQMNSLRAEDTAVYYCARDLRGAFDIWGQGTMVTVSS

SEQ ID NO: 8075 - protein, 120 aa, synthetic construct
  REGION 1..120: note = Description of Artificial Sequence: Synthetic polypeptide
QVQLVQSGAEVKKPGASVKVSCKPSGYTVTSHYIHWVRRAPGQGLEWMGMINPSGGVTAYSQTLQGRVTMTSDTSSSTVYMELSSLRSEDTAMYYCAREGSGSGWYFDFWGRGTLVTVSS

SEQ ID NO: 8076 - protein, 123 aa, synthetic construct
  REGION 1..123: note = Description of Artificial Sequence: Synthetic polypeptide
QVQLQESGPGLVKPSQTLSLTCTVSGGSISSGGYYWSWIRQHPGKGLEWIGYIYYSGSTYYNPSLKSRVTISVDTSKNQFSLKLSSVTAADTAVYYCARAGIAARLRGAFDIWGQGTMVTVSS

SEQ ID NO: 8077 - protein, 129 aa, synthetic construct
  REGION 1..129: note = Description of Artificial Sequence: Synthetic polypeptide
QVQLVQSGAEVKKPGSSVKVSCKASGGTFSSYAISWVRQAPGQGLEWMGGIIPIFGTANYAQKFQGRVTITADESTSTAYMELSSLRSEDTAVYYCARRGGYQLLRWDVGLLRSAFDIWGQGTMVTVSS

SEQ ID NO: 8078 - protein, 125 aa, synthetic construct
  REGION 1..125: note = Description of Artificial Sequence: Synthetic polypeptide
EVQLQQSGPGLVKPSQTLSLTCAISGDSVSSNSAAWNWIRQSPSRGLEWLGRTYYRSKWYSFYAISLKSRIIINPDTSKNQFSLQLKSVTPEDTAVYYCARSSPEGLFLYWFDPWGQGTLVTVSS

SEQ ID NO: 8079 - protein, 118 aa, synthetic construct
  REGION 1..118: note = Description of Artificial Sequence: Synthetic polypeptide
EVQLVESGGGLVQPGGSLRLSCAASGFTFSSYAMSWVRQAPGKGLEWVSAISGSGGSTYYADSVKGRFTISRDNSKNTLYLQMNSLRAEDTAVYYCAKVEGSGSLDYWGQGTLVTVSS

SEQ ID NO: 8080 - protein, 118 aa, synthetic construct
  REGION 1..118: note = Description of Artificial Sequence: Synthetic polypeptide
EVQLVETGGGLVQPGGSLRLSCAASGITFSRYPMSWVRQAPGKGLEWVSGISDSGVSTYYADSAKGRFTISRDNSKNTLFLQMSSLRDEDTAVYYCVTRAGSEASDIWGQGTMVTVSS

SEQ ID NO: 8081 - protein, 124 aa, synthetic construct
  REGION 1..124: note = Description of Artificial Sequence: Synthetic polypeptide
QVQLVESGGGLVQPGGSLRLSCAASGFTFSSYAMSWVRQAPGKGLEWVSAISGSGGSTYYADSVKGRFTISRDNAKNSLYLQMNSLRAEDTAIYYCARATYKRELRYYYGMDVWGQGTMVTVSS

SEQ ID NO: 8082 - protein, 124 aa, synthetic construct
  REGION 1..124: note = Description of Artificial Sequence: Synthetic polypeptide
EVQLVETGGGLVQPGGSLRLSCAASGFTFSSYAMSWVRQAPGKGLEWVSAISGSGGSTYYADSVKGRFTISRDNSKNTLYLQMNTLKAEDTAVYYCARATYKRELRYYYGMDVWGQGTTVTVSS

SEQ ID NO: 8083 - protein, 117 aa, synthetic construct
  REGION 1..117: note = Description of Artificial Sequence: Synthetic polypeptide
EVQLVETGGGLVQPGRSLRLSCAASGFTFDDYAMHWVRQAPGKGLEWVSGISWNSGSIGYADSVKGRFTISRDNAKNSLYLQMNSLRDEDTAVYYCARVGKAVPDVWGQGTTVTVSS

SEQ ID NO: 8084 - protein, 122 aa, synthetic construct
  REGION 1..122: note = Description of Artificial Sequence: Synthetic polypeptide
EVQLVESGGGLVQPGRSLRLSCTASGFTFDDYAMHWVRQRPGKGLEWVASINWKGNSLAYGDSVKGRFAISRDNAKNTVFLQMNSLRTEDTAVYYCASHQGVAYYNYAMDVWGRGTLVTVSS

SEQ ID NO: 8085 - protein, 117 aa, synthetic construct
  REGION 1..117: note = Description of Artificial Sequence: Synthetic polypeptide
EVQLVESGGGLVQPGGSLRLSCAASGFTFSSYAMSWVRQAPGKGLEWVSAISGSGGSTYYADSVKGRFTISRDNSKNTLYLQMNSLRAEDTAVYYCAKVVRDGMDVWGQGTTVTVSS

SEQ ID NO: 8086 - protein, 118 aa, synthetic construct
  REGION 1..118: note = Description of Artificial Sequence: Synthetic polypeptide
EVQLLESGGGLVQPGGSLRLSCAASGFTFSSYAMSWVRQAPGKGLEWVSAISGSGGSTYYADSVKGRFTISRDNSKNTLYLQMNSLRAEDTAVYYCAKIPQTGTFDYWGQGTLVTVSS

SEQ ID NO: 8087 - protein, 124 aa, synthetic construct
  REGION 1..124: note = Description of Artificial Sequence: Synthetic polypeptide
EVQLVETGGGLVQPGGSLRLSCAASGFTFSSYAMSWVRQAPGKGLEWVSAISGSGGSTYYADSVKGRFTMSRENDKNSVFLQMNSLRVEDTGVYYCARANYKRELRYYYGMDVWGQGTMVTVSS

SEQ ID NO: 8088 - protein, 120 aa, synthetic construct
  REGION 1..120: note = Description of Artificial Sequence: Synthetic polypeptide
EVQLLETGGGLVQPGGSLRLSCAASGFSFSSYAMSWVRQAPGKGLEWVSAISGSGGSTYYADSVKGRFTISRDNSKNTLYLQMNSLRAEDTAVYYCAKALVGATGAFDIWGQGTLVTVSS

SEQ ID NO: 8089 - protein, 117 aa, synthetic construct
  REGION 1..117: note = Description of Artificial Sequence: Synthetic polypeptide
EVQLLESGGGLVQPGGSLRLSCAASGFTFSSYAMSWVRQAPGKGLEWVSAISGSGGSTYYADSVKGRFTISRDNSKNTLYLQMNSLRAEDTAVYYCVLWFGEGFDPWGQGTLVTVSS

SEQ ID NO: 8090 - protein, 126 aa, synthetic construct
  REGION 1..126: note = Description of Artificial Sequence: Synthetic polypeptide
QVQLVESGGGLVQPGGSLRLSCAASGFTFSSYAMSWVRQAPGKGLEWVSAISGSGGSTYYADSVKGRFTISRDNSKNTLYLQMNSLRAEDTAVYYCAKVGYDSSGYYRDYYGMDVWGQGTTVTVSS

SEQ ID NO: 8091 - protein, 122 aa, synthetic construct
  REGION 1..122: note = Description of Artificial Sequence: Synthetic polypeptide
EVQLVESGGGLVQPGGSLRLSCAASGFTFSSYAMSWVRQAPGKGLEWVSAISGSGGSTYYADSVKGRFTISRDNSKNTLYLQMNSLRAEDTAVYYCAKMGWSSGYLGAFDIWGQGTTVTVSS

SEQ ID NO: 8092 - protein, 107 aa, synthetic construct
  REGION 1..107: note = Description of Artificial Sequence: Synthetic polypeptide
ETTLTQSPAFMSATPGDKVIISCKASQDIDDAMNWYQQKPGEAPLFIIQSATSPVPGIPPRFSGSGFGTDFSLTINNIESEDAAYYFCLQHDNFPLTFGQGTKLEIK

SEQ ID NO: 8093 - protein, 107 aa, synthetic construct
  REGION 1..107: note = Description of Artificial Sequence: Synthetic polypeptide
DIQMTQSPSSLSASVGDRVTITCRASQDIYNNLAWFQLKPGSAPRSLMYAANKSQSGVPSRFSGSASGTDFTLTISSLQPEDFATYYCQHYYRFPYSFGQGTKLEIK

SEQ ID NO: 8094 - protein, 112 aa, synthetic construct
  REGION 1..112: note = Description of Artificial Sequence: Synthetic polypeptide
EIVLTQSPLSLPVTPEEPASISCRSSQSLLHSNGYNYLDWYLQKPGQSPQLLIYLGSNRASGVPDRFSGSGSGTDFTLKISRVEAEDVGVYYCMQALQTPYTFGQGTKLEIK

SEQ ID NO: 8095 - protein, 108 aa, synthetic construct
  REGION 1..108: note = Description of Artificial Sequence: Synthetic polypeptide
SYVLTQSPSVSAAPGYTATISCGGNNIGTKSVHWYQQKPGQAPLLVIRDDSVRPSKIPGRFSGSNSGNMATLTISGVQAGDEADFYCQVWDSDSEHVVFGGGTKLTVL

SEQ ID NO: 8096 - protein, 106 aa, synthetic construct
  REGION 1..106: note = Description of Artificial Sequence: Synthetic polypeptide
SYVLTQPPSVSVSPGQTASITCSGDGLSKKYVSWYQQKAGQSPVVLISRDKERPSGIPDRFSGSNSADTATLTISGTQAMDEADYYCQAWDDTTVVFGGGTKLTVL

SEQ ID NO: 8097 - protein, 107 aa, synthetic construct
  REGION 1..107: note = Description of Artificial Sequence: Synthetic polypeptide
DIVMTQSPSSVSASVGDRVIITCRASQGIRNWLAWYQQKPGKAPNLLIYAASNLQSGVPSRFSGSGSGADFTLTISSLQPEDVATYYCQKYNSAPFTFGPGTKVDIK

SEQ ID NO: 8098 - protein, 109 aa, synthetic construct
  REGION 1..109: note = Description of Artificial Sequence: Synthetic polypeptide
SYVLTQPPSVSVAPGQTARITCGGNNIGSKSVHWYQQKPGQAPVLVLYGKNNRPSGVPDRFSGSRSGTTASLTITGAQAEDEADYYCSSRDSSGDHLRVFGTGTKVTVL

SEQ ID NO: 8099 - protein, 108 aa, synthetic construct
  REGION 1..108: note = Description of Artificial Sequence: Synthetic polypeptide
SSELTQDPAVSVALGQTIRITCQGDSLGNYYATWYQQKPGQAPVLVIYGTNNRPSGIPDRFSASSSGNTASLTITGAQAEDEADYYCNSRDSSGHHLLFGTGTKVTVL

SEQ ID NO: 8100 - protein, 113 aa, synthetic construct
  REGION 1..113: note = Description of Artificial Sequence: Synthetic polypeptide
EIVMTQSPGTLSLSPGERATLSCRASQSVSSAYLAWYQQKPGQPPRLLISGASTRATGIPDRFGGSGSGTDFTLTISRLEPEDFAVYYCQHYGSSFNGSSLFTFGQGTRLEIK

SEQ ID NO: 8101 - protein, 108 aa, synthetic construct
  REGION 1..108: note = Description of Artificial Sequence: Synthetic polypeptide
EIVLTQSPATLSLSPGERATLSCRASQSVSNSLAWYQQKPGQAPRLLIYDASSRATGIPDRFSGSGSGTDFTLTISRLEPEDFAIYYCQQFGTSSGLTFGGGTKLEIK

SEQ ID NO: 8102 - protein, 109 aa, synthetic construct
  REGION 1..109: note = Description of Artificial Sequence: Synthetic polypeptide
EIVMTQSPGTVSLSPGERATLSCRASQSVSSSFLAWYQQKPGQAPRLLIYGASSRATGIPDRFSGSGSGTDFTLTISRLEPEDSAVYYCQQYHSSPSWTFGQGTRLEIK

SEQ ID NO: 8103 - protein, 109 aa, synthetic construct
  REGION 1..109: note = Description of Artificial Sequence: Synthetic polypeptide
EIVLTQSPSTLSLSPGESATLSCRASQSVSTTFLAWYQQKPGQAPRLLIYGSSNRATGIPDRFSGSGSGTDFTLTIRRLEPEDFAVYYCQQYHSSPSWTFGQGTKVEIK

SEQ ID NO: 8104 - protein, 107 aa, synthetic construct
  REGION 1..107: note = Description of Artificial Sequence: Synthetic polypeptide
DIVMTQTPSSLSASVGDRVTITCRASQSISSYLNWYQQKPGKAPKLLIYAASSLQSGVPSRFSGSGSGTDFTLTISSLQPEDFATYYCQQSYSTPYSFGQGTRLEIK

SEQ ID NO: 8105 - protein, 109 aa, synthetic construct
  REGION 1..109: note = Description of Artificial Sequence: Synthetic polypeptide
EIVLTQSPGTLSLSPGERATLSCRATQSIGSSFLAWYQQRPGQAPRLLIYGASQRATGIPDRFSGRGSGTDFTLTISRVEPEDSAVYYCQHYESSPSWTFGQGTKVEIK

SEQ ID NO: 8106 - protein, 109 aa, synthetic construct
  REGION 1..109: note = Description of Artificial Sequence: Synthetic polypeptide
EIVLTQSPATLSLSPGERATLSCRASQSVSSSYLAWYQQKPGQAPRLLIYGASSRATGIPDRFSGNGSGTDFTLTISRLEPEDFAVYYCQQYGSPPRFTFGPGTKVDIK

SEQ ID NO: 8107 - protein, 109 aa, synthetic construct
  REGION 1..109: note = Description of Artificial Sequence: Synthetic polypeptide
EIVLTQSPGTLSLSPGERATLSCRASQSVSSSYLAWYQQRPGQAPRLLIYGASSRATGIPDRFSGSGSGTDFTLTISRLEPEDFAVYYCQHYGSSPSWTFGQGTRLEIK

SEQ ID NO: 8108 - protein, 109 aa, synthetic construct
  REGION 1..109: note = Description of Artificial Sequence: Synthetic polypeptide
EIVMTQSPGTLSLSPGESATLSCRASQRVASNYLAWYQHKPGQAPSLLISGASSRATGVPDRFSGSGSGTDFTLAISRLEPEDSAVYYCQHYDSSPSWTFGQGTKVEIK

SEQ ID NO: 8109 - protein, 109 aa, synthetic construct
  REGION 1..109: note = Description of Artificial Sequence: Synthetic polypeptide
EIVLTQSPGTLSLSPGERATLSCRASQSLSSNFLAWYQQKPGQAPGLLIYGASNWATGTPDRFSGSGSGTDFTLTITRLEPEDFAVYYCQYYGTSPMYTFGQGTKVEIK

SEQ ID NO: 8110 - protein, 112 aa, synthetic construct
  REGION 1..112: note = Description of Artificial Sequence: Synthetic polypeptide
DIVLTQSPLSLPVTPGEPASISCRSSQSLLHSNGYNYLDWYLQKPGQSPQLLIYLGSNRASGVPDRFSGSGSGTDFTLKISRVEAEDVGVYYCMQALQTPLTFGGGTKVDIK

SEQ ID NO: 8111 - protein, 110 aa, synthetic construct
  REGION 1..110: note = Description of Artificial Sequence: Synthetic polypeptide
EIVLTQSPGTLSLSPGERATLSCRASQSVSSSYLAWYQQKPGQAPRLLIYGTSSRATGISDRFSGSGSGTDFTLTISRLEPEDFAVYYCQHYGNSPPKFTFGPGTKLEIK

SEQ ID NO: 8112 - protein, 109 aa, synthetic construct
  REGION 1..109: note = Description of Artificial Sequence: Synthetic polypeptide
EIVLTQSPGTLSLSPGERATLSCRASQSVASSFLAWYQQKPGQAPRLLIYGASGRATGIPDRFSGSGSGTDFTLTISRLEPEDFAVYYCQHYGGSPRLTFGGGTKVDIK

SEQ ID NO: 8113-8154 - skipped (42 entries)

SEQ ID NO: 8155 - protein, 122 aa, synthetic construct
  REGION 1..122: note = Description of Artificial Sequence: Synthetic polypeptide
QIQLVQSGPDLKKPGETVKLSCKASGYTFTNFGMNWVKQAPGKGFKWMAWINTYTGESYFADDFKGRFAFSVETSATTAYLQINNLKTEDTATYFCARGEIYYGYDGGFAYWGQGTLVTVSA

SEQ ID NO: 8156 - protein, 117 aa, synthetic construct
  REGION 1..117: note = Description of Artificial Sequence: Synthetic polypeptide
QIQLVQSGPELKKPGETVKISCKASGYTFTDYSINWVKRAPGKGLKWMGWINTETREPAYAYDFRGRFAFSLETSASTAYLQINNLKYEDTATYFCALDYSYAMDYWGQGTSVTVSS

SEQ ID NO: 8157 - protein, 117 aa, synthetic construct
  REGION 1..117: note = Description of Artificial Sequence: Synthetic polypeptide
QIQLVQSGPELKKPGETVKISCKASGYTFRHYSMNWVKQAPGKGLKWMGRINTESGVPIYADDFKGRFAFSVETSASTAYLVINNLKDEDTASYFCSNDYLYSLDFWGQGTALTVSS

SEQ ID NO: 8158 - protein, 117 aa, synthetic construct
  REGION 1..117: note = Description of Artificial Sequence: Synthetic polypeptide
QIQLVQSGPELKKPGETVKISCKASGYTFTHYSMNWVKQAPGKGLKWMGRINTETGEPLYADDFKGRFAFSLETSASTAYLVINNLKNEDTATFFCSNDYLYSCDYWGQGTTLTVSS

SEQ ID NO: 8159 - protein, 107 aa, synthetic construct
  REGION 1..107: note = Description of Artificial Sequence: Synthetic polypeptide
DVVMTQSHRFMSTSVGDRVSITCRASQDVNTAVSWYQQKPGQSPKLLIFSASYRYTGVPDRFTGSGSGADFTLTISSVQAEDLAVYYCQQHYSTPWTFGGGTKLDIK

SEQ ID NO: 8160 - protein, 111 aa, synthetic construct
  REGION 1..111: note = Description of Artificial Sequence: Synthetic polypeptide
DIVLTQSPASLAMSLGKRATISCRASESVSVIGAHLIHWYQQKPGQPPKLLIYLASNLETGVPARFSGSGSGTDFTLTIDPVEEDDVAIYSCLQSRIFPRTFGGGTKLEIK

SEQ ID NO: 8161 - protein, 111 aa, synthetic construct
  REGION 1..111: note = Description of Artificial Sequence: Synthetic polypeptide
DIVLTQSPPSLAMSLGKRATISCRASESVTILGSHLIYWYQQKPGQPPTLLIQLASNVQTGVPARFSGSGSRTDFTLTIDPVEEDDVAVYYCLQSRTIPRTFGGGTKLEIK

SEQ ID NO: 8162 - protein, 111 aa, synthetic construct; identical to SEQ ID NO: 8161
  REGION 1..111: note = Description of Artificial Sequence: Synthetic polypeptide

SEQ ID NO: 8163 - protein, 244 aa, synthetic construct
  REGION 1..244: note = Description of Artificial Sequence: Synthetic polypeptide
QIQLVQSGPDLKKPGETVKLSCKASGYTFTNFGMNWVKQAPGKGFKWMAWINTYTGESYFADDFKGRFAFSVETSATTAYLQINNLKTEDTATYFCARGEIYYGYDGGFAYWGQGTLVTVSAGGGGSGGGGSGGGGSDVVMTQSHRFMSTSVGDRVSITCRASQDVNTAVSWYQQKPGQSPKLLIFSASYRYTGVPDRFTGSGSGADFTLTISSVQAEDLAVYYCQQHYSTPWTFGGGTKLDIK

SEQ ID NO: 8164 - protein, 249 aa, synthetic construct
  REGION 1..249: note = Description of Artificial Sequence: Synthetic polypeptide
QIQLVQSGPELKKPGETVKISCKASGYTFTDYSINWVKRAPGKGLKWMGWINTETREPAYAYDFRGRFAFSLETSASTAYLQINNLKYEDTATYFCALDYSYAMDYWGQGTSVTVSSGGGGSGGGGSGGGGSQIQLVQSGPELKKPGETVKISCKASGYTFTDYSINWVKRAPGKGLKWMGWINTETREPAYAYDFRGRFAFSLETSASTAYLQINNLKYEDTATYFCALDYSYAMDYWGQGTSVTVSS

SEQ ID NO: 8165 - protein, 243 aa, synthetic construct
  REGION 1..243: note = Description of Artificial Sequence: Synthetic polypeptide
QIQLVQSGPELKKPGETVKISCKASGYTFRHYSMNWVKQAPGKGLKWMGRINTESGVPIYADDFKGRFAFSVETSASTAYLVINNLKDEDTASYFCSNDYLYSLDFWGQGTALTVSSGGGGSGGGGSGGGGSDIVLTQSPPSLAMSLGKRATISCRASESVTILGSHLIYWYQQKPGQPPTLLIQLASNVQTGVPARFSGSGSRTDFTLTIDPVEEDDVAVYYCLQSRTIPRTFGGGTKLEIK

SEQ ID NO: 8166 - protein, 243 aa, synthetic construct
  REGION 1..243: note = Description of Artificial Sequence: Synthetic polypeptide
QIQLVQSGPELKKPGETVKISCKASGYTFTHYSMNWVKQAPGKGLKWMGRINTETGEPLYADDFKGRFAFSLETSASTAYLVINNLKNEDTATFFCSNDYLYSCDYWGQGTTLTVSSGGGGSGGGGSGGGGSDIVLTQSPPSLAMSLGKRATISCRASESVTILGSHLIYWYQQKPGQPPTLLIQLASNVQTGVPARFSGSGSRTDFTLTIDPVEEDDVAVYYCLQSRTIPRTFGGGTKLEIK

SEQ ID NO: 8167 - protein, 18 aa, synthetic construct
  REGION 1..18: note = Description of Artificial Sequence: Synthetic peptide
GSTSGSGKPGSGEGSTKG

SEQ ID NO: 8168-8283 - skipped (116 entries)

SEQ ID NO: 8284 - protein, 5 aa, synthetic construct
  REGION 1..5: note = Description of Artificial Sequence: Synthetic peptide
NYAMS

SEQ ID NO: 8285 - protein, 5 aa, synthetic construct
  REGION 1..5: note = Description of Artificial Sequence: Synthetic peptide
DYAMH

SEQ ID NO: 8286 - protein, 5 aa, synthetic construct
  REGION 1..5: note = Description of Artificial Sequence: Synthetic peptide
NHGMS

SEQ ID NO: 8287 - protein, 5 aa, synthetic construct
  REGION 1..5: note = Description of Artificial Sequence: Synthetic peptide
NFGIN

SEQ ID NO: 8288 - protein, 5 aa, synthetic construct
  REGION 1..5: note = Description of Artificial Sequence: Synthetic peptide
SDAMT

SEQ ID NO: 8289 - protein, 5 aa, synthetic construct
  REGION 1..5: note = Description of Artificial Sequence: Synthetic peptide
NYGIT

SEQ ID NO: 8290 - protein, 5 aa, synthetic construct
  REGION 1..5: note = Description of Artificial Sequence: Synthetic peptide
NHGMS

SEQ ID NO: 8291 - protein, 5 aa, synthetic construct
  REGION 1..5: note = Description of Artificial Sequence: Synthetic peptide
NHGMS

SEQ ID NO: 8292 - protein, 5 aa, synthetic construct
  REGION 1..5: note = Description of Artificial Sequence: Synthetic peptide
NHGMS

SEQ ID NO: 8293 - protein, 5 aa, synthetic construct
  REGION 1..5: note = Description of Artificial Sequence: Synthetic peptide
DYYMS

SEQ ID NO: 8294 - protein, 5 aa, synthetic construct
  REGION 1..5: note = Description of Artificial Sequence: Synthetic peptide
NHGMS

SEQ ID NO: 8295 - protein, 5 aa, synthetic construct
  REGION 1..5: note = Description of Artificial Sequence: Synthetic peptide
DYYMS

SEQ ID NO: 8296 - protein, 5 aa, synthetic construct
  REGION 1..5: note = Description of Artificial Sequence: Synthetic peptide
NHGMS

SEQ ID NO: 8297 - protein, 5 aa, synthetic construct
  REGION 1..5: note = Description of Artificial Sequence: Synthetic peptide
NHGMS

SEQ ID NO: 8298 - protein, 5 aa, synthetic construct
  REGION 1..5: note = Description of Artificial Sequence: Synthetic peptide
NHGMS

SEQ ID NO: 8299 - protein, 7 aa, synthetic construct
  REGION 1..7: note = Description of Artificial Sequence: Synthetic peptide
SSYYYWG

SEQ ID NO: 8300 - protein, 7 aa, synthetic construct
  REGION 1..7: note = Description of Artificial Sequence: Synthetic peptide
TSGMCVS

SEQ ID NO: 8301 - protein, 5 aa, synthetic construct
  REGION 1..5: note = Description of Artificial Sequence: Synthetic peptide
SYSMN

SEQ ID NO: 8302 - protein, 5 aa, synthetic construct
  REGION 1..5: note = Description of Artificial Sequence: Synthetic peptide
DYYMS

SEQ ID NO: 8303 - protein, 5 aa, synthetic construct
  REGION 1..5: note = Description of Artificial Sequence: Synthetic peptide
SHYIH

SEQ ID NO: 8304 - protein, 7 aa, synthetic construct
  REGION 1..7: note = Description of Artificial Sequence: Synthetic peptide
SGGYYWS

SEQ ID NO: 8305 - protein, 5 aa, synthetic construct
  REGION 1..5: note = Description of Artificial Sequence: Synthetic peptide
SYAIS

SEQ ID NO: 8306 - protein, 7 aa, synthetic construct
  REGION 1..7: note = Description of Artificial Sequence: Synthetic peptide
SNSAAWN

SEQ ID NO: 8307 - protein, 5 aa, synthetic construct
  REGION 1..5: note = Description of Artificial Sequence: Synthetic peptide
SYAMS

SEQ ID NO: 8308 - protein, 5 aa, synthetic construct
  REGION 1..5: note = Description of Artificial Sequence: Synthetic peptide
RYPMS

SEQ ID NO: 8309 - protein, 5 aa, synthetic construct
  REGION 1..5: note = Description of Artificial Sequence: Synthetic peptide
SYAMS

SEQ ID NO: 8310 - protein, 5 aa, synthetic construct
  REGION 1..5: note = Description of Artificial Sequence: Synthetic peptide
SYAMS

SEQ ID NO: 8311 - protein, 5 aa, synthetic construct
  REGION 1..5: note = Description of Artificial Sequence: Synthetic peptide
DYAMH

SEQ ID NO: 8312 - protein, 5 aa, synthetic construct
  REGION 1..5: note = Description of Artificial Sequence: Synthetic peptide
DYAMH

SEQ ID NO: 8313 - protein, 5 aa, synthetic construct
  REGION 1..5: note = Description of Artificial Sequence: Synthetic peptide
SYAMS

SEQ ID NO: 8314 - protein, 5 aa, synthetic construct
  REGION 1..5: note = Description of Artificial Sequence: Synthetic peptide
SYAMS

SEQ ID NO: 8315 - protein, 5 aa, synthetic construct
  REGION 1..5: note = Description of Artificial Sequence: Synthetic peptide
SYAMS

SEQ ID NO: 8316 - protein, 5 aa, synthetic construct
  REGION 1..5: note = Description of Artificial Sequence: Synthetic peptide
SYAMS

SEQ ID NO: 8317 - protein, 5 aa, synthetic construct
  REGION 1..5: note = Description of Artificial Sequence: Synthetic peptide
SYAMS

SEQ ID NO: 8318 - protein, 5 aa, synthetic construct
  REGION 1..5: note = Description of Artificial Sequence: Synthetic peptide
SYAMS

SEQ ID NO: 8319 - protein, 5 aa, synthetic construct
  REGION 1..5: note = Description of Artificial Sequence: Synthetic peptide
SYAMS

SEQ ID NO: 8320 - protein, 5 aa, synthetic construct
  REGION 1..5: note = Description of Artificial Sequence: Synthetic peptide
NFGMN

SEQ ID NO: 8321 - protein, 5 aa, synthetic construct
  REGION 1..5: note = Description of Artificial Sequence: Synthetic peptide
DYSIN

SEQ ID NO: 8322 - protein, 5 aa, synthetic construct
  REGION 1..5: note = Description of Artificial Sequence: Synthetic peptide
HYSMN

SEQ ID NO: 8323 - protein, 5 aa, synthetic construct
  REGION 1..5: note = Description of Artificial Sequence: Synthetic peptide
HYSMN

SEQ ID NO: 8324 - protein, 17 aa, synthetic construct
  REGION 1..17: note = Description of Artificial Sequence: Synthetic peptide
GISRSGENTYYADSVKG

SEQ ID NO: 8325 - protein, 17 aa, synthetic construct
  REGION 1..17: note = Description of Artificial Sequence: Synthetic peptide
GISWNSGSIGYADSVKG

SEQ ID NO: 8326 - protein, 16 aa, synthetic construct
  REGION 1..16: note = Description of Artificial Sequence: Synthetic peptide
GIVYSGSTYYAASVKG

SEQ ID NO: 8327 - protein, 17 aa, synthetic construct
  REGION 1..17: note = Description of Artificial Sequence: Synthetic peptide
WINPKNNNTNYAQKFQG

SEQ ID NO: 8328 - protein, 17 aa, synthetic construct
  REGION 1..17: note = Description of Artificial Sequence: Synthetic peptide
VISGSGGTTYYADSVKG

SEQ ID NO: 8329 - protein, 17 aa, synthetic construct
  REGION 1..17: note = Description of Artificial Sequence: Synthetic peptide
WISAYNGNTNYAQKFQG

SEQ ID NO: 8330 - protein, 16 aa, synthetic construct
  REGION 1..16: note = Description of Artificial Sequence: Synthetic peptide
GIVYSGSTYYAASVKG

SEQ ID NO: 8331 - protein, 16 aa, synthetic construct
  REGION 1..16: note = Description of Artificial Sequence: Synthetic peptide
GIVYSGSTYYAASVKG

SEQ ID NO: 8332 - protein, 16 aa, synthetic construct
  REGION 1..16: note = Description of Artificial Sequence: Synthetic peptide
GIVYSGSTYYAASVKG

SEQ ID NO: 8333 - protein, 17 aa, synthetic construct
  REGION 1..17: note = Description of Artificial Sequence: Synthetic peptide
YISSSGSTIYYADSVKG

SEQ ID NO: 8334 - protein, 16 aa, synthetic construct
  REGION 1..16: note = Description of Artificial Sequence: Synthetic peptide
GIVYSGSTYYAASVKG

SEQ ID NO: 8335 - protein, 17 aa, synthetic construct
  REGION 1..17: note = Description of Artificial Sequence: Synthetic peptide
YISSSGNTIYYADSVKG

SEQ ID NO: 8336 - protein, 16 aa, synthetic construct
  REGION 1..16: note = Description of Artificial Sequence: Synthetic peptide
GIVYSGSTYYAASVKG

SEQ ID NO: 8337 - protein, 16 aa, synthetic construct
  REGION 1..16: note = Description of Artificial Sequence: Synthetic peptide
GIVYSGSTYYAASVKG

SEQ ID NO: 8338 - protein, 16 aa, synthetic construct
  REGION 1..16: note = Description of Artificial Sequence: Synthetic peptide
GIVYSGSTYYAASVKG

SEQ ID NO: 8339 - protein, 16 aa, synthetic construct
  REGION 1..16: note = Description of Artificial Sequence: Synthetic peptide
SIYYSGSAYYNPSLKS

SEQ ID NO: 8340 - protein, 16 aa, synthetic construct
  REGION 1..16: note = Description of Artificial Sequence: Synthetic peptide
RIDWDEDKFYSTSLKT

SEQ ID NO: 8341 - protein, 17 aa, synthetic construct
  REGION 1..17: note = Description of Artificial Sequence: Synthetic peptide
SISSSSSYIYYADSVKG

SEQ ID NO: 8342 - protein, 17 aa, synthetic construct
  REGION 1..17: note = Description of Artificial Sequence: Synthetic peptide
YISSSGSTIYYADSVKG

SEQ ID NO: 8343 - protein, 17 aa, synthetic construct
  REGION 1..17: note = Description of Artificial Sequence: Synthetic peptide
MINPSGGVTAYSQTLQG

SEQ ID NO: 8344 - protein, 16 aa, synthetic construct
  REGION 1..16: note = Description of Artificial Sequence: Synthetic peptide
YIYYSGSTYYNPSLKS

SEQ ID NO: 8345 - protein, 17 aa, synthetic construct
  REGION 1..17: note = Description of Artificial Sequence: Synthetic peptide
GIIPIFGTANYAQKFQG

SEQ ID NO: 8346 - protein, 18 aa, synthetic construct
  REGION 1..18: note = Description of Artificial Sequence: Synthetic peptide
RTYYRSKWYSFYAISLKS

SEQ ID NO: 8347 - protein, 17 aa, synthetic construct
  REGION 1..17: note = Description of Artificial Sequence: Synthetic peptide
AISGSGGSTYYADSVKG

SEQ ID NO: 8348 - protein, 17 aa, synthetic construct
  REGION 1..17: note = Description of Artificial Sequence: Synthetic peptide
GISDSGVSTYYADSAKG

SEQ ID NO: 8349 - protein, 17 aa, synthetic construct
  REGION 1..17: note = Description of Artificial Sequence: Synthetic peptide
AISGSGGSTYYADSVKG

SEQ ID NO: 8350 - protein, 17 aa, synthetic construct
  REGION 1..17: note = Description of Artificial Sequence: Synthetic peptide
AISGSGGSTYYADSVKG

SEQ ID NO: 8351 - protein, 17 aa, synthetic construct
  REGION 1..17: note = Description of Artificial Sequence: Synthetic peptide
GISWNSGSIGYADSVKG

SEQ ID NO: 8352 - protein, 17 aa, synthetic construct
  REGION 1..17: note = Description of Artificial Sequence: Synthetic peptide
SINWKGNSLAYGDSVKG

SEQ ID NO: 8353 - protein, 17 aa, synthetic construct
  REGION 1..17: note = Description of Artificial Sequence: Synthetic peptide
AISGSGGSTYYADSVKG

SEQ ID NO: 8354 - protein, 17 aa, synthetic construct
  REGION 1..17: note = Description of Artificial Sequence: Synthetic peptide
AISGSGGSTYYADSVKG

SEQ ID NO: 8355 - protein, 17 aa, synthetic construct
  REGION 1..17: note = Description of Artificial Sequence: Synthetic peptide
AISGSGGSTYYADSVKG

SEQ ID NO: 8356 - protein, 17 aa, synthetic construct
  REGION 1..17: note = Description of Artificial Sequence: Synthetic peptide
AISGSGGSTYYADSVKG

SEQ ID NO: 8357 - protein, 17 aa, synthetic construct
  REGION 1..17: note = Description of Artificial Sequence: Synthetic peptide
AISGSGGSTYYADSVKG

SEQ ID NO: 8358 - protein, 17 aa, synthetic construct
  REGION 1..17: note = Description of Artificial Sequence: Synthetic peptide
AISGSGGSTYYADSVKG

SEQ ID NO: 8359 - protein, 17 aa, synthetic construct
  REGION 1..17: note = Description of Artificial Sequence: Synthetic peptide
AISGSGGSTYYADSVKG

SEQ ID NO: 8360 - protein, 17 aa, synthetic construct
  REGION 1..17: note = Description of Artificial Sequence: Synthetic peptide
WINTYTGESYFADDFKG

SEQ ID NO: 8361 - protein, 17 aa, synthetic construct
  REGION 1..17: note = Description of Artificial Sequence: Synthetic peptide
WINTETREPAYAYDFRG

SEQ ID NO: 8362 - protein, 17 aa, synthetic construct
  REGION 1..17: note = Description of Artificial Sequence: Synthetic peptide
RINTESGVPIYADDFKG

SEQ ID NO: 8363 - protein, 17 aa, synthetic construct
  REGION 1..17: note = Description of Artificial Sequence: Synthetic peptide
RINTETGEPLYADDFKG

SEQ ID NO: 8364 - protein, 11 aa, synthetic construct
  REGION 1..11: note = Description of Artificial Sequence: Synthetic peptide
SPAHYYGGMDV

SEQ ID NO: 8365 - protein, 6 aa, synthetic construct
  REGION 1..6: note = Description of Artificial Sequence: Synthetic peptide
HSFLAY

SEQ ID NO: 8366 - protein, 7 aa, synthetic construct
  REGION 1..7: note = Description of Artificial Sequence: Synthetic peptide
HGGESDV

SEQ ID NO: 8367 - protein, 11 aa, synthetic construct
  REGION 1..11: note = Description of Artificial Sequence: Synthetic peptide
GPYYYQSYMDV

SEQ ID NO: 8368 - protein, 14 aa, synthetic construct
  REGION 1..14: note = Description of Artificial Sequence: Synthetic peptide
LDSSGYYYARGPRY

SEQ ID NO: 8369 - protein, 9 aa, synthetic construct
  REGION 1..9: note = Description of Artificial Sequence: Synthetic peptide
GPYYYYMDV

SEQ ID NO: 8370 - protein, 7 aa, synthetic construct
  REGION 1..7: note = Description of Artificial Sequence: Synthetic peptide
HGGESDV

SEQ ID NO: 8371 - protein, 7 aa, synthetic construct
  REGION 1..7: note = Description of Artificial Sequence: Synthetic peptide
HGGESDV

SEQ ID NO: 8372 - protein, 7 aa, synthetic construct
  REGION 1..7: note = Description of Artificial Sequence: Synthetic peptide
HGGESDV

SEQ ID NO: 8373 - protein, 8 aa, synthetic construct
  REGION 1..8: note = Description of Artificial Sequence: Synthetic peptide
ESGDGMDV

SEQ ID NO: 8374 - protein, 7 aa, synthetic construct
  REGION 1..7: note = Description of Artificial Sequence: Synthetic peptide
HGGESDV

SEQ ID NO: 8375 - protein, 8 aa, synthetic construct
  REGION 1..8: note = Description of Artificial Sequence: Synthetic peptide
STMVREDY

SEQ ID NO: 8376 - protein, 7 aa, synthetic construct
  REGION 1..7: note = Description of Artificial Sequence: Synthetic peptide
HGGESDV

SEQ ID NO: 8377 - protein, 7 aa, synthetic construct
  REGION 1..7: note = Description of Artificial Sequence: Synthetic peptide
HGGESDV

SEQ ID NO: 8378 - protein, 7 aa, synthetic construct
  REGION 1..7: note = Description of Artificial Sequence: Synthetic peptide
HGGESDV

SEQ ID NO: 8379 - protein, 11 aa, synthetic construct
  REGION 1..11: note = Description of Artificial Sequence: Synthetic peptide
HWQEWPDAFDI

SEQ ID NO: 8380 - protein, 13 aa, synthetic construct
  REGION 1..13: note = Description of Artificial Sequence: Synthetic peptide
SGAGGTSATAFDI

SEQ ID NO: 8381 - protein, 10 aa, synthetic construct
  REGION 1..10: note = Description of Artificial Sequence: Synthetic peptide
TIAAVYAFDI

SEQ ID NO: 8382 - protein, 8 aa, synthetic construct
  REGION 1..8: note = Description of Artificial Sequence: Synthetic peptide
DLRGAFDI

SEQ ID NO: 8383 - protein, 11 aa, synthetic construct
  REGION 1..11: note = Description of Artificial Sequence: Synthetic peptide
EGSGSGWYFDF

SEQ ID NO: 8384 - protein, 13 aa, synthetic construct
  REGION 1..13: note = Description of Artificial Sequence: Synthetic peptide
AGIAARLRGAFDI

SEQ ID NO: 8385 - protein, 20 aa, synthetic construct
  REGION 1..20: note = Description of Artificial Sequence: Synthetic peptide
RGGYQLLRWDVGLLRSAFDI

SEQ ID NO: 8386 - protein, 13 aa, synthetic construct
  REGION 1..13: note = Description of Artificial Sequence: Synthetic peptide
SSPEGLFLYWFDP

SEQ ID NO: 8387 - protein, 9 aa, synthetic construct
  REGION 1..9: note = Description of Artificial Sequence: Synthetic peptide
VEGSGSLDY

SEQ ID NO: 8388 - protein, 9 aa, synthetic construct
  REGION 1..9: note = Description of Artificial Sequence: Synthetic peptide
RAGSEASDI

SEQ ID NO: 8389 - protein, 15 aa, synthetic construct
  REGION 1..15: note = Description of Artificial Sequence: Synthetic peptide
ATYKRELRYYYGMDV

SEQ ID NO: 8390 - protein, 15 aa, synthetic construct
  REGION 1..15: note = Description of Artificial Sequence: Synthetic peptide
ATYKRELRYYYGMDV

SEQ ID NO: 8391 - protein, 8 aa, synthetic construct
  REGION 1..8: note = Description of Artificial Sequence: Synthetic peptide
VGKAVPDV

SEQ ID NO: 8392 - protein, 13 aa, synthetic construct
  REGION 1..13: note = Description of Artificial Sequence: Synthetic peptide
HQGVAYYNYAMDV

SEQ ID NO: 8393 - protein, 8 aa, synthetic construct
  REGION 1..8: note = Description of Artificial Sequence: Synthetic peptide
VVRDGMDV

SEQ ID NO: 8394 - protein, 9 aa, synthetic construct
  REGION 1..9: note = Description of Artificial Sequence: Synthetic peptide
IPQTGTFDY

SEQ ID NO: 8395 - protein, 15 aa, synthetic construct
  REGION 1..15: note = Description of Artificial Sequence: Synthetic peptide
ANYKRELRYYYGMDV

SEQ ID NO: 8396 - protein, 11 aa, synthetic construct
  REGION 1..11: note = Description of Artificial Sequence: Synthetic peptide
ALVGATGAFDI

SEQ ID NO: 8397 - protein, 8 aa, synthetic construct
  REGION 1..8: note = Description of Artificial Sequence: Synthetic peptide
WFGEGFDP

SEQ ID NO: 8398 - protein, 17 aa, synthetic construct
  REGION 1..17: note = Description of Artificial Sequence: Synthetic peptide
VGYDSSGYYRDYYGMDV

SEQ ID NO: 8399 - protein, 13 aa, synthetic construct
  REGION 1..13: note = Description of Artificial Sequence: Synthetic peptide
MGWSSGYLGAFDI

SEQ ID NO: 8400 - protein, 13 aa, synthetic construct
  REGION 1..13: note = Description of Artificial Sequence: Synthetic peptide
GEIYYGYDGGFAY

SEQ ID NO: 8401 - protein, 8 aa, synthetic construct
  REGION 1..8: note = Description of Artificial Sequence: Synthetic peptide
DYSYAMDY

SEQ ID NO: 8402 - protein, 8 aa, synthetic construct
  REGION 1..8: note = Description of Artificial Sequence: Synthetic peptide
DYLYSLDF

SEQ ID NO: 8403 - protein, 8 aa, synthetic construct
  REGION 1..8: note = Description of Artificial Sequence: Synthetic peptide
DYLYSCDY

SEQ ID NO: 8404 - protein, 12 aa, synthetic construct
  REGION 1..12: note = Description of Artificial Sequence: Synthetic peptide
RASQSISSSFLA

SEQ ID NO: 8405 - protein, 16 aa, synthetic construct
  REGION 1..16: note = Description of Artificial Sequence: Synthetic peptide
RSSQSLLHSNGYNYLD

SEQ ID NO: 8406 - protein, 16 aa, synthetic construct
  REGION 1..16: note = Description of Artificial Sequence: Synthetic peptide
KSSQSLLRNDGKTPLY

SEQ ID NO: 8407 - protein, 16 aa, synthetic construct
  REGION 1..16: note = Description of Artificial Sequence: Synthetic peptide
RSSQSLLHSNGYNYLN

SEQ ID NO: 8408 - protein, 11 aa, synthetic construct
  REGION 1..11: note = Description of Artificial Sequence: Synthetic peptide
RASQSISSYLN

SEQ ID NO: 8409 - protein, 16 aa, synthetic construct
  REGION 1..16: note = Description of Artificial Sequence: Synthetic peptide
RSSQSLLYSNGYNYVD

SEQ ID NO: 8410 - protein, 11 aa, synthetic construct
  REGION 1..11: note = Description of Artificial Sequence: Synthetic peptide
RASQSVSSNLA

SEQ ID NO: 8411 - protein, 11 aa, synthetic construct
  REGION 1..11: note = Description of Artificial Sequence: Synthetic peptide
RASQSVSSKLA

SEQ ID NO: 8412 - protein, 12 aa, synthetic construct
  REGION 1..12: note = Description of Artificial Sequence: Synthetic peptide
RASQSVGSTNLA

SEQ ID NO: 8413 - protein, 11 aa, synthetic construct
  REGION 1..11: note = Description of Artificial Sequence: Synthetic peptide
RASQSISSYLN

SEQ ID NO: 8414 - protein, 11 aa, synthetic construct
  REGION 1..11: note = Description of Artificial Sequence: Synthetic peptide
RASQSISSYLN

SEQ ID NO: 8415 - protein, 16 aa, synthetic construct
  REGION 1..16: note = Description of Artificial Sequence: Synthetic peptide
KSSESLVHNSGKTYLN

SEQ ID NO: 8416 - protein, 11 aa, synthetic construct
  REGION 1..11: note = Description of Artificial Sequence: Synthetic peptide
QASEDINKFLN

SEQ ID NO: 8417 - protein, 11 aa, synthetic construct
  REGION 1..11: note = Description of Artificial Sequence: Synthetic peptide
RASQSVGSNLA

SEQ ID NO: 8418 - protein, 12 aa, synthetic construct
  REGION 1..12: note = Description of Artificial Sequence: Synthetic peptide
RASQSIGSSSLA

SEQ ID NO: 8419 - protein, 11 aa, synthetic construct
  REGION 1..11: note = Description of Artificial Sequence: Synthetic peptide
KASQDIDDAMN

SEQ ID NO: 8420 - protein, 11 aa, synthetic construct
  REGION 1..11: note = Description of Artificial Sequence: Synthetic peptide
RASQDIYNNLA

SEQ ID NO: 8421 - protein, 16 aa, synthetic construct
  REGION 1..16: note = Description of Artificial Sequence: Synthetic peptide
RSSQSLLHSNGYNYLD

SEQ ID NO: 8422 - protein, 11 aa, synthetic construct
  REGION 1..11: note = Description of Artificial Sequence: Synthetic peptide
GGNNIGTKSVH

SEQ ID NO: 8423 - protein, 11 aa, synthetic construct
  REGION 1..11: note = Description of Artificial Sequence: Synthetic peptide
SGDGLSKKYVS

SEQ ID NO: 8424 - protein, 11 aa, synthetic construct
  REGION 1..11: note = Description of Artificial Sequence: Synthetic peptide
RASQGIRNWLA

SEQ ID NO: 8425 - protein, 11 aa, synthetic construct
  REGION 1..11: note = Description of Artificial Sequence: Synthetic peptide
GGNNIGSKSVH

SEQ ID NO: 8426 - protein, 11 aa, synthetic construct
  REGION 1..11: note = Description of Artificial Sequence: Synthetic peptide
QGDSLGNYYAT

SEQ ID NO: 8427 - protein, 12 aa, synthetic construct
  REGION 1..12: note = Description of Artificial Sequence: Synthetic peptide
RASQSVSSAYLA

SEQ ID NO: 8428 - protein, 11 aa, synthetic construct
  REGION 1..11: note = Description of Artificial Sequence: Synthetic peptide
RASQSVSNSLA

SEQ ID NO: 8429 - protein, 12 aa, synthetic construct
  REGION 1..12: note = Description of Artificial Sequence: Synthetic peptide
RASQSVSSSFLA

SEQ ID NO: 8430 - protein, 12 aa, synthetic construct
  REGION 1..12: note = Description of Artificial Sequence: Synthetic peptide
RASQSVSTTFLA

SEQ ID NO: 8431 - protein, 11 aa, synthetic construct
  REGION 1..11: note = Description of Artificial Sequence: Synthetic peptide
RASQSISSYLN

SEQ ID NO: 8432 - protein, 12 aa, synthetic construct
  REGION 1..12: note = Description of Artificial Sequence: Synthetic peptide
RATQSIGSSFLA

SEQ ID NO: 8433 - protein, 12 aa, synthetic construct
  REGION 1..12: note = Description of Artificial Sequence: Synthetic peptide
RASQSVSSSYLA

SEQ ID NO: 8434 - protein, 12 aa, synthetic construct
  REGION 1..12: note = Description of Artificial Sequence: Synthetic peptide
RASQSVSSSYLA

SEQ ID NO: 8435 - protein, 12 aa, synthetic construct
  REGION 1..12: note = Description of Artificial Sequence: Synthetic peptide
RASQRVASNYLA

SEQ ID NO: 8436 - protein, 12 aa, synthetic construct
  REGION 1..12: note = Description of Artificial Sequence: Synthetic peptide
RASQSLSSNFLA

SEQ ID NO: 8437 - protein, 16 aa, synthetic construct
  REGION 1..16: note = Description of Artificial Sequence: Synthetic peptide
RSSQSLLHSNGYNYLD

SEQ ID NO: 8438 - protein, 12 aa, synthetic construct
  REGION 1..12: note = Description of Artificial Sequence: Synthetic peptide
RASQSVSSSYLA

SEQ ID NO: 8439 - protein, 12 aa, synthetic construct
  REGION 1..12: note = Description of Artificial Sequence: Synthetic peptide
RASQSVASSFLA

SEQ ID NO: 8440 - protein, 11 aa, synthetic construct
  REGION 1..11: note = Description of Artificial Sequence: Synthetic peptide
RASQDVNTAVS

SEQ ID NO: 8441 - protein, 15 aa, synthetic construct
  REGION 1..15: note = Description of Artificial Sequence: Synthetic peptide
RASESVSVIGAHLIH

SEQ ID NO: 8442 - protein, 15 aa, synthetic construct
  REGION 1..15: note = Description of Artificial Sequence: Synthetic peptide
RASESVTILGSHLIY

SEQ ID NO: 8443 - protein, 15 aa, synthetic construct
  REGION 1..15: note = Description of Artificial Sequence: Synthetic peptide
RASESVTILGSHLIY

SEQ ID NO: 8444 - protein, 7 aa, synthetic construct
  REGION 1..7: note = Description of Artificial Sequence: Synthetic peptide
GASRRAT

SEQ ID NO: 8445 - protein, 7 aa, synthetic construct
  REGION 1..7: note = Description of Artificial Sequence: Synthetic peptide
LGSNRAS

SEQ ID NO: 8446 - protein, 7 aa, synthetic construct
  REGION 1..7: note = Description of Artificial Sequence: Synthetic peptide
EVSNRFS

SEQ ID NO: 8447 - protein, 7 aa, synthetic construct
  REGION 1..7: note = Description of Artificial Sequence: Synthetic peptide
LGSKRAS

SEQ ID NO: 8448 - protein, 7 aa, synthetic construct
  REGION 1..7: note = Description of Artificial Sequence: Synthetic peptide
GASTLAS

SEQ ID NO: 8449 - protein, 7 aa, synthetic construct
  REGION 1..7: note = Description of Artificial Sequence: Synthetic peptide
LGSNRAS

SEQ ID NO: 8450 - protein, 7 aa, synthetic construct
  REGION 1..7: note = Description of Artificial Sequence: Synthetic peptide
GASTRAS

SEQ ID NO: 8451 - protein, 7 aa, synthetic construct
  REGION 1..7: note = Description of Artificial Sequence: Synthetic peptide
GASIRAT

SEQ ID NO: 8452 - protein, 7 aa, synthetic construct
  REGION 1..7: note = Description of Artificial Sequence: Synthetic peptide
DASNRAT

SEQ ID NO: 8453 - protein, 7 aa, synthetic construct
  REGION 1..7: note = Description of Artificial Sequence: Synthetic peptide
AASSLQS

SEQ ID NO: 8454 - protein, 7 aa, synthetic construct
  REGION 1..7: note = Description of Artificial Sequence: Synthetic peptide
AASSLQS

SEQ ID NO: 8455 - protein, 7 aa, synthetic construct
  REGION 1..7: note = Description of Artificial Sequence: Synthetic peptide
EVSNRDS

SEQ ID NO: 8456 - protein, 7 aa, synthetic construct
  REGION 1..7: note = Description of Artificial Sequence: Synthetic peptide
DASTLQT

SEQ ID NO: 8457 - protein, 7 aa, synthetic construct
  REGION 1..7: note = Description of Artificial Sequence: Synthetic peptide
GASTRAT

SEQ ID NO: 8458 - protein, 7 aa, synthetic construct
  REGION 1..7: note = Description of Artificial Sequence: Synthetic peptide
GASSRAS

SEQ ID NO: 8459 - protein, 7 aa, synthetic construct
  REGION 1..7: note = Description of Artificial Sequence: Synthetic peptide
SATSPVP

SEQ ID NO: 8460 - protein, 7 aa, synthetic construct
  REGION 1..7: note = Description of Artificial Sequence: Synthetic peptide
AANKSQS

SEQ ID NO: 8461 - protein, 7 aa, synthetic construct
  REGION 1..7: note = Description of Artificial Sequence: Synthetic peptide
LGSNRAS

SEQ ID NO: 8462 - protein, 7 aa, synthetic construct
  REGION 1..7: note = Description of Artificial Sequence: Synthetic peptide
DDSVRPS

SEQ ID NO: 8463 - protein, 7 aa, synthetic construct
  REGION 1..7: note = Description of Artificial Sequence: Synthetic peptide
RDKERPS

SEQ ID NO: 8464 - protein, 7 aa, synthetic construct
  REGION 1..7: note = Description of Artificial Sequence: Synthetic peptide
AASNLQS

SEQ ID NO: 8465 - protein, 7 aa, synthetic construct
  REGION 1..7: note = Description of Artificial Sequence: Synthetic peptide
GKNNRPS

SEQ ID NO: 8466 - protein, 7 aa, synthetic construct
  REGION 1..7: note = Description of Artificial Sequence: Synthetic peptide
GTNNRPS

SEQ ID NO: 8467 - protein, 7 aa, synthetic construct
  REGION 1..7: note = Description of Artificial Sequence: Synthetic peptide
GASTRAT

SEQ ID NO: 8468 - protein, 7 aa, synthetic construct
  REGION 1..7: note = Description of Artificial Sequence: Synthetic peptide
DASSRAT

SEQ ID NO: 8469 - protein, 7 aa, synthetic construct
  REGION 1..7: note = Description of Artificial Sequence: Synthetic peptide
GASSRAT

SEQ ID NO: 8470 - protein, 7 aa, synthetic construct
  REGION 1..7: note = Description of Artificial Sequence: Synthetic peptide
GSSNRAT

SEQ ID NO: 8471 - protein, 7 aa, synthetic construct
  REGION 1..7: note = Description of Artificial Sequence: Synthetic peptide
AASSLQS

SEQ ID NO: 8472 - protein, 7 aa, synthetic construct
  REGION 1..7: note = Description of Artificial Sequence: Synthetic peptide
GASQRAT

SEQ ID NO: 8473 - protein, 7 aa, synthetic construct
  REGION 1..7: note = Description of Artificial Sequence: Synthetic peptide
GASSRAT

SEQ ID NO: 8474 - protein, 7 aa, synthetic construct
  REGION 1..7: note = Description of Artificial Sequence: Synthetic peptide
GASSRAT

SEQ ID NO: 8475 - protein, 7 aa, synthetic construct
  REGION 1..7: note = Description of Artificial Sequence: Synthetic peptide
GASSRAT

SEQ ID NO: 8476 - protein, 7 aa, synthetic construct
  REGION 1..7: note = Description of Artificial Sequence: Synthetic peptide
GASNWAT

SEQ ID NO: 8477 - protein, 7 aa, synthetic construct
  REGION 1..7: note = Description of Artificial Sequence: Synthetic peptide
LGSNRAS

SEQ ID NO: 8478 - protein, 7 aa, synthetic construct
  REGION 1..7: note = Description of Artificial Sequence: Synthetic peptide
GTSSRAT

SEQ ID NO: 8479 - protein, 7 aa, synthetic construct
  REGION 1..7: note = Description of Artificial Sequence: Synthetic peptide
GASGRAT

SEQ ID NO: 8480 - protein, 7 aa, synthetic construct
  REGION 1..7: note = Description of Artificial Sequence: Synthetic peptide
SASYRYT

SEQ ID NO: 8481 - protein, 7 aa, synthetic construct
  REGION 1..7: note = Description of Artificial Sequence: Synthetic peptide
LASNLET

SEQ ID NO: 8482 - protein, 7 aa, synthetic construct
  REGION 1..7: note = Description of Artificial Sequence: Synthetic peptide
LASNVQT

SEQ ID NO: 8483 - protein, 7 aa, synthetic construct
  REGION 1..7: note = Description of Artificial Sequence: Synthetic peptide
LASNVQT

SEQ ID NO: 8484 - protein, 10 aa, synthetic construct
  REGION 1..10: note = Description of Artificial Sequence: Synthetic peptide
QQYHSSPSWT

SEQ ID NO: 8485 - protein, 9 aa, synthetic construct
  REGION 1..9: note = Description of Artificial Sequence: Synthetic peptide
MQALQTPYT

SEQ ID NO: 8486 - protein, 8 aa, synthetic construct
  REGION 1..8: note = Description of Artificial Sequence: Synthetic peptide
MQNIQFPS

SEQ ID NO: 8487 - protein, 9 aa, synthetic construct
  REGION 1..9: note = Description of Artificial Sequence: Synthetic peptide
MQALQTPYT

SEQ ID NO: 8488 - protein, 8 aa, synthetic construct
  REGION 1..8: note = Description of Artificial Sequence: Synthetic peptide
QQSYKRAS

SEQ ID NO: 8489 - protein, 9 aa, synthetic construct
  REGION 1..9: note = Description of Artificial Sequence: Synthetic peptide
MQGRQFPYS

SEQ ID NO: 8490 - protein, 8 aa, synthetic construct
  REGION 1..8: note = Description of Artificial Sequence: Synthetic peptide
QQYGSSLT

SEQ ID NO: 8491 - protein, 9 aa, synthetic construct
  REGION 1..9: note = Description of Artificial Sequence: Synthetic peptide
QQYGSSSWT

SEQ ID NO: 8492 - protein, 10 aa, synthetic construct
  REGION 1..10: note = Description of Artificial Sequence: Synthetic peptide
QQYGSSPPWT

SEQ ID NO: 8493 - protein, 7 aa, synthetic construct
  REGION 1..7: note = Description of Artificial Sequence: Synthetic peptide
QQSYTLA

SEQ ID NO: 8494 - protein, 9 aa, synthetic construct
  REGION 1..9: note = Description of Artificial Sequence: Synthetic peptide
QQSYSTPYT

SEQ ID NO: 8495 - protein, 9 aa, synthetic construct
  REGION 1..9: note = Description of Artificial Sequence: Synthetic peptide
MQGTHWPGT

SEQ ID NO: 8496 - protein, 9 aa, synthetic construct
  REGION 1..9: note = Description of Artificial Sequence: Synthetic peptide
QQYESLPLT

SEQ ID NO: 8497 - protein, 10 aa, synthetic construct
  REGION 1..10: note = Description of Artificial Sequence: Synthetic peptide
QQYNDWLPVT

SEQ ID NO: 8498 - protein, 10 aa, synthetic construct
  REGION 1..10: note = Description of Artificial Sequence: Synthetic peptide
QQYAGSPPFT

SEQ ID NO: 8499 - protein, 9 aa, synthetic construct
  REGION 1..9: note = Description of Artificial Sequence: Synthetic peptide
LQHDNFPLT

SEQ ID NO: 8500 - protein, 9 aa, synthetic construct
  REGION 1..9: note = Description of Artificial Sequence: Synthetic peptide
QHYYRFPYS

SEQ ID NO: 8501 - protein, 9 aa, synthetic construct
  REGION 1..9: note = Description of Artificial Sequence: Synthetic peptide
MQALQTPYT

SEQ ID NO: 8502 - protein, 11 aa, synthetic construct
  REGION 1..11: note = Description of Artificial Sequence: Synthetic peptide
QVWDSDSEHVV

SEQ ID NO: 8503 - protein, 9 aa, synthetic construct
  REGION 1..9: note = Description of Artificial Sequence: Synthetic peptide
QAWDDTTVV

SEQ ID NO: 8504 - protein, 9 aa, synthetic construct
  REGION 1..9: note = Description of Artificial Sequence: Synthetic peptide
QKYNSAPFT

SEQ ID NO: 8505 - protein, 12 aa, synthetic construct
  REGION 1..12: note = Description of Artificial Sequence: Synthetic peptide
SSRDSSGDHLRV

SEQ ID NO: 8506 - protein, 11 aa, synthetic construct
  REGION 1..11: note = Description of Artificial Sequence: Synthetic peptide
NSRDSSGHHLL

SEQ ID NO: 8507 - protein, 14 aa, synthetic construct
  REGION 1..14: note = Description of Artificial Sequence: Synthetic peptide
QHYGSSFNGSSLFT

SEQ ID NO: 8508 - protein, 10 aa, synthetic construct
  REGION 1..10: note = Description of Artificial Sequence: Synthetic peptide
QQFGTSSGLT

SEQ ID NO: 8509 - protein, 10 aa, synthetic construct
  REGION 1..10: note = Description of Artificial Sequence: Synthetic peptide
QQYHSSPSWT

SEQ ID NO: 8510 - protein, 10 aa, synthetic construct
  REGION 1..10: note = Description of Artificial Sequence: Synthetic peptide
QQYHSSPSWT

SEQ ID NO: 8511 - protein, 9 aa, synthetic construct
  REGION 1..9: note = Description of Artificial Sequence: Synthetic peptide
QQSYSTPYS

SEQ ID NO: 8512 - protein, 10 aa, synthetic construct
  REGION 1..10: note = Description of Artificial Sequence: Synthetic peptide
QHYESSPSWT

SEQ ID NO: 8513 - protein, 10 aa, synthetic construct
  REGION 1..10: note = Description of Artificial Sequence: Synthetic peptide
QQYGSPPRFT

SEQ ID NO: 8514 - protein, 10 aa, synthetic construct
  REGION 1..10: note = Description of Artificial Sequence: Synthetic peptide
QHYGSSPSWT

SEQ ID NO: 8515 - protein, 10 aa, synthetic construct
  REGION 1..10: note = Description of Artificial Sequence: Synthetic peptide
QHYDSSPSWT

SEQ ID NO: 8516 - protein, 10 aa, synthetic construct
  REGION 1..10: note = Description of Artificial Sequence: Synthetic peptide
QYYGTSPMYT

SEQ ID NO: 8517 - protein, 9 aa, synthetic construct
  REGION 1..9: note = Description of Artificial Sequence: Synthetic peptide
MQALQTPLT

SEQ ID NO: 8518 - protein, 11 aa, synthetic construct
  REGION 1..11: note = Description of Artificial Sequence: Synthetic peptide
QHYGNSPPKFT

SEQ ID NO: 8519 - protein, 10 aa, synthetic construct
  REGION 1..10: note = Description of Artificial Sequence: Synthetic peptide
QHYGGSPRLT

SEQ ID NO: 8520 - protein, 9 aa, synthetic construct
  REGION 1..9: note = Description of Artificial Sequence: Synthetic peptide
QQHYSTPWT

SEQ ID NO: 8521 - protein, 9 aa, synthetic construct
  REGION 1..9: note = Description of Artificial Sequence: Synthetic peptide
LQSRIFPRT

SEQ ID NO: 8522 - protein, 9 aa, synthetic construct
  REGION 1..9: note = Description of Artificial Sequence: Synthetic peptide
LQSRTIPRT

SEQ ID NO: 8523 - protein, 9 aa, synthetic construct
  REGION 1..9: note = Description of Artificial Sequence: Synthetic peptide
LQSRTIPRT

SEQ ID NO: 8524-8548 - skipped (25 entries)

SEQ ID NO: 8549 - protein, 490 aa, synthetic construct
  REGION 1..490: note = Description of Artificial Sequence: Synthetic polypeptide
MALPVTALLLPLALLLHAARPQVQLVESGGGLVQPGRSLRLSCAASGFTFSNYAMSWVRQAPGKGLGWVSGISRSGENTYYADSVKGRFTISRDNSKNTLYLQMNSLRDEDTAVYYCARSPAHYYGGMDVWGQGTTVTVSSASGGGGSGGRASGGGGSDIVLTQSPGTLSLSPGERATLSCRASQSISSSFLAWYQQKPGQAPRLLIYGASRRATGIPDRFSGSGSGTDFTLTISRLEPEDSAVYYCQQYHSSPSWTFGQGTKLEIKTTTPAPRPPTPAPTIASQPLSLRPEACRPAAGGAVHTRGLDFACDIYIWAPLAGTCGVLLLSLVITLYCKRGRKKLLYIFKQPFMRPVQTTQEEDGCSCRFPEEEEGGCELRVKFSRSADAPAYKQGQNQLYNELNLGRREEYDVLDKRRGRDPEMGGKPRRKNPQEGLYNELQKDKMAEAYSEIGMKGERRRGKGHDGLYQGLSTATKDTYDALHMQALPPR

SEQ ID NO: 8550 - protein, 488 aa, synthetic construct
  REGION 1..488: note = Description of Artificial Sequence: Synthetic polypeptide
MALPVTALLLPLALLLHAARPQVQLVESGGGLVQPGRSLRLSCAASGFTFDDYAMHWVRQAPGKGLEWVSGISWNSGSIGYADSVKGRFTISRDNAKNSLYLQMNSLRAEDTALYYCSVHSFLAYWGQGTLVTVSSASGGGGSGGRASGGGGSDIVMTQTPLSLPVTPGEPASISCRSSQSLLHSNGYNYLDWYLQKPGQSPQLLIYLGSNRASGVPDRFSGSGSGTDFTLKISRVEAEDVGVYYCMQALQTPYTFGQGTKVEIKTTTPAPRPPTPAPTIASQPLSLRPEACRPAAGGAVHTRGLDFACDIYIWAPLAGTCGVLLLSLVITLYCKRGRKKLLYIFKQPFMRPVQTTQEEDGCSCRFPEEEEGGCELRVKFSRSADAPAYKQGQNQLYNELNLGRREEYDVLDKRRGRDPEMGGKPRRKNPQEGLYNELQKDKMAEAYSEIGMKGERRRGKGHDGLYQGLSTATKDTYDALHMQALPPR

SEQ ID NO: 8551 - protein, 487 aa, synthetic construct
  REGION 1..487: note = Description of Artificial Sequence: Synthetic polypeptide
MALPVTALLLPLALLLHAARPEVQLLESGGGLVQPGGSLRLSCAVSGFALSNHGMSWVRRAPGKGLEWVSGIVYSGSTYYAASVKGRFTISRDNSRNTLYLQMNSLRPEDTAIYYCSAHGGESDVWGQGTTVTVSSASGGGGSGGRASGGGGSDIVMTQTPLSLSVTPGQPASISCKSSQSLLRNDGKTPLYWYLQKAGQPPQLLIYEVSNRFSGVPDRFSGSGSGTDFTLKISRVEAEDVGAYYCMQNIQFPSFGGGTKLEIKTTTPAPRPPTPAPTIASQPLSLRPEACRPAAGGAVHTRGLDFACDIYIWAPLAGTCGVLLLSLVITLYCKRGRKKLLYIFKQPFMRPVQTTQEEDGCSCRFPEEEEGGCELRVKFSRSADAPAYKQGQNQLYNELNLGRREEYDVLDKRRGRDPEMGGKPRRKNPQEGLYNELQKDKMAEAYSEIGMKGERRRGKGHDGLYQGLSTATKDTYDALHMQALPPR

SEQ ID NO: 8552 - protein, 493 aa, synthetic construct
  REGION 1..493: note = Description of Artificial Sequence: Synthetic polypeptide
MALPVTALLLPLALLLHAARPQVQLVQSGAEVRKTGASVKVSCKASGYIFDNFGINWVRQAPGQGLEWMGWINPKNNNTNYAQKFQGRVTITADESTNTAYMEVSSLRSEDTAVYYCARGPYYYQSYMDVWGQGTMVTVSSASGGGGSGGRASGGGGSDIVMTQTPLSLPVTPGEPASISCRSSQSLLHSNGYNYLNWYLQKPGQSPQLLIYLGSKRASGVPDRFSGSGSGTDFTLHITRVGAEDVGVYYCMQALQTPYTFGQGTKLEIKTTTPAPRPPTPAPTIASQPLSLRPEACRPAAGGAVHTRGLDFACDIYIWAPLAGTCGVLLLSLVITLYCKRGRKKLLYIFKQPFMRPVQTTQEEDGCSCRFPEEEEGGCELRVKFSRSADAPAYKQGQNQLYNELNLGRREEYDVLDKRRGRDPEMGGKPRRKNPQEGLYNELQKDKMAEAYSEIGMKGERRRGKGHDGLYQGLSTATKDTYDALHMQALPPR

SEQ ID NO: 8553 - protein, 490 aa, synthetic construct
  REGION 1..490: note = Description of Artificial Sequence: Synthetic polypeptide
MALPVTALLLPLALLLHAARPQVQLQESGGGLVQPGGSLRLSCAASGFTFSSDAMTWVRQAPGKGLEWVSVISGSGGTTYYADSVKGRFTISRDNSKNTLYLQMNSLRAEDTAVYYCAKLDSSGYYYARGPRYWGQGTLVTVSSASGGGGSGGRASGGGGSDIQLTQSPSSLSASVGDRVTITCRASQSISSYLNWYQQKPGKAPKLLIYGASTLASGVPARFSGSGSGTHFTLTINSLQSEDSATYYCQQSYKRASFGQGTKVEIKTTTPAPRPPTPAPTIASQPLSLRPEACRPAAGGAVHTRGLDFACDIYIWAPLAGTCGVLLLSLVITLYCKRGRKKLLYIFKQPFMRPVQTTQEEDGCSCRFPEEEEGGCELRVKFSRSADAPAYKQGQNQLYNELNLGRREEYDVLDKRRGRDPEMGGKPRRKNPQEGLYNELQKDKMAEAYSEIGMKGERRRGKGHDGLYQGLSTATKDTYDALHMQALPPR

SEQ ID NO: 8554 - protein, 491 aa, synthetic construct
  REGION 1..491: note = Description of Artificial Sequence: Synthetic polypeptide
MALPVTALLLPLALLLHAARPQVQLVQSGAEVKKPGASVKVSCKASGYTFSNYGITWVRQAPGQGLEWMGWISAYNGNTNYAQKFQGRVTMTRNTSISTAYMELSSLRSEDTAVYYCARGPYYYYMDVWGKGTMVTVSSASGGGGSGGRASGGGGSEIVMTQSPLSLPVTPGEPASISCRSSQSLLYSNGYNYVDWYLQKPGQSPQLLIYLGSNRASGVPDRFSGSGSGTDFKLQISRVEAEDVGIYYCMQGRQFPYSFGQGTKVEIKTTTPAPRPPTPAPTIASQPLSLRPEACRPAAGGAVHTRGLDFACDIYIWAPLAGTCGVLLLSLVITLYCKRGRKKLLYIFKQPFMRPVQTTQEEDGCSCRFPEEEEGGCELRVKFSRSADAPAYKQGQNQLYNELNLGRREEYDVLDKRRGRDPEMGGKPRRKNPQEGLYNELQKDKMAEAYSEIGMKGERRRGKGHDGLYQGLSTATKDTYDALHMQALPPR

SEQ ID NO: 8555 - protein, 482 aa, synthetic construct
  REGION 1..482: note = Description of Artificial Sequence: Synthetic polypeptide
MALPVTALLLPLALLLHAARPEVQLLETGGGLVQPGGSLRLSCAVSGFALSNHGMSWVRRAPGKGLEWVSGIVYSGSTYYAASVKGRFTISRDNSRNTLYLQMNSLRPEDTAIYYCSAHGGESDVWGQGTTVTVSSASGGGGSGGRASGGGGSEIVLTQSPATLSVSPGESATLSCRASQSVSSNLAWYQQKPGQAPRLLIYGASTRASGIPDRFSGSGSGTDFTLTISSLQAEDVAVYYCQQYGSSLTFGGGTKVEIKTTTPAPRPPTPAPTIASQPLSLRPEACRPAAGGAVHTRGLDFACDIYIWAPLAGTCGVLLLSLVITLYCKRGRKKLLYIFKQPFMRPVQTTQEEDGCSCRFPEEEEGGCELRVKFSRSADAPAYKQGQNQLYNELNLGRREEYDVLDKRRGRDPEMGGKPRRKNPQEGLYNELQKDKMAEAYSEIGMKGERRRGKGHDGLYQGLSTATKDTYDALHMQALPPR

SEQ ID NO: 8556 - protein, 483 aa, synthetic construct
  REGION 1..483: note = Description of Artificial Sequence: Synthetic polypeptide
MALPVTALLLPLALLLHAARPEVQLVETGGGLVQPGGSLRLSCAVSGFALSNHGMSWVRRAPGKGLEWVSGIVYSGSTYYAASVKGRFTISRDNSRNTLYLQMNSLRPEDTAIYYCSAHGGESDVWGQGTTVTVSSASGGGGSGGRASGGGGSEIVMTQSPATLSVSPGERATLSCRASQSVSSKLAWYQQKPGQAPRLLMYGASIRATGIPDRFSGSGSGTEFTLTISSLEPEDFAVYYCQQYGSSSWTFGQGTKVEIKTTTPAPRPPTPAPTIASQPLSLRPEACRPAAGGAVHTRGLDFACDIYIWAPLAGTCGVLLLSLVITLYCKRGRKKLLYIFKQPFMRPVQTTQEEDGCSCRFPEEEEGGCELRVKFSRSADAPAYKQGQNQLYNELNLGRREEYDVLDKRRGRDPEMGGKPRRKNPQEGLYNELQKDKMAEAYSEIGMKGERRRGKGHDGLYQGLSTATKDTYDALHMQALPPR

SEQ ID NO: 8557 - protein, 485 aa, synthetic construct
  REGION 1..485: note = Description of Artificial Sequence: Synthetic polypeptide
MALPVTALLLPLALLLHAARPEVQLVETGGGVVQPGGSLRLSCAVSGFALSNHGMSWVRRAPGKGLEWVSGIVYSGSTYYAASVKGRFTISRDNSRNTLYLQMNSLRPEDTAIYYCSAHGGESDVWGQGTTVTVSSASGGGGSGGRASGGGGSEIVLTQSPGTLSLSPGERATLSCRASQSVGSTNLAWYQQKPGQAPRLLIYDASNRATGIPDRFSGGGSGTDFTLTISRLEPEDFAVYYCQQYGSSPPWTFGQGTKVEIKTTTPAPRPPTPAPTIASQPLSLRPEACRPAAGGAVHTRGLDFACDIYIWAPLAGTCGVLLLSLVITLYCKRGRKKLLYIFKQPFMRPVQTTQEEDGCSCRFPEEEEGGCELRVKFSRSADAPAYKQGQNQLYNELNLGRREEYDVLDKRRGRDPEMGGKPRRKNPQEGLYNELQKDKMAEAYSEIGMKGERRRGKGHDGLYQGLSTATKDTYDALHMQALPPR

SEQ ID NO: 8558 - protein, 483 aa, synthetic construct
  REGION 1..483: note = Description of Artificial Sequence: Synthetic polypeptide
MALPVTALLLPLALLLHAARPQVQLVESGGGLVKPGGSLRLSCAASGFTFSDYYMSWIRQAPGKGLEWVSYISSSGSTIYYADSVKGRFTISRDNAKNSLYLQMNSLRAEDTAVYYCARESGDGMDVWGQGTTVTVSSASGGGGSGGRASGGGGSDIQMTQSPSSLSASVGDRVTITCRASQSISSYLNWYQQKPGKAPKLLIYAASSLQSGVPSRFSGSGSGTDFTLTISSLQPEDFATYYCQQSYTLAFGQGTKVDIKTTTPAPRPPTPAPTIASQPLSLRPEACRPAAGGAVHTRGLDFACDIYIWAPLAGTCGVLLLSLVITLYCKRGRKKLLYIFKQPFMRPVQTTQEEDGCSCRFPEEEEGGCELRVKFSRSADAPAYKQGQNQLYNELNLGRREEYDVLDKRRGRDPEMGGKPRRKNPQEGLYNELQKDKMAEAYSEIGMKGERRRGKGHDGLYQGLSTATKDTYDALHMQALPPR

SEQ ID NO: 8559 - protein, 483 aa, synthetic construct
  REGION 1..483: note = Description of Artificial Sequence: Synthetic polypeptide
MALPVTALLLPLALLLHAARPEVQLVESGGGLVQPGGSLRLSCAVSGFALSNHGMSWVRRAPGKGLEWVSGIVYSGSTYYAASVKGRFTISRDNSRNTLYLQMNSLRPEDTAIYYCSAHGGESDVWGQGTTVTVSSASGGGGSGGRASGGGGSDIQLTQSPSSLSASVGDRVTITCRASQSISSYLNWYQQKPGKAPKLLIYAASSLQSGVPSRFSGSGSGTDFTLTISSLQPEDFATYYCQQSYSTPYTFGQGTKVEIKTTTPAPRPPTPAPTIASQPLSLRPEACRPAAGGAVHTRGLDFACDIYIWAPLAGTCGVLLLSLVITLYCKRGRKKLLYIFKQPFMRPVQTTQEEDGCSCRFPEEEEGGCELRVKFSRSADAPAYKQGQNQLYNELNLGRREEYDVLDKRRGRDPEMGGKPRRKNPQEGLYNELQKDKMAEAYSEIGMKGERRRGKGHDGLYQGLSTATKDTYDALHMQALPPR

SEQ ID NO: 8560 - protein, 490 aa, synthetic construct
  REGION 1..490: note = Description of Artificial Sequence: Synthetic polypeptide
MALPVTALLLPLALLLHAARPQVQLVQSGGGLVKPGGSLRLSCAASGFTFSDYYMSWIRQAPGKGLEWVSYISSSGNTIYYADSVKGRFTISRDNAKNSLYLQMNSLRAEDTAVYYCARSTMVREDYWGQGTLVTVSSASGGGGSGGRASGGGGSDIVLTQSPLSLPVTLGQPASISCKSSESLVHNSGKTYLNWFHQRPGQSPRRLIYEVSNRDSGVPDRFTGSGSGTDFTLKISRVEAEDVGVYYCMQGTHWPGTFGQGTKLEIKTTTPAPRPPTPAPTIASQPLSLRPEACRPAAGGAVHTRGLDFACDIYIWAPLAGTCGVLLLSLVITLYCKRGRKKLLYIFKQPFMRPVQTTQEEDGCSCRFPEEEEGGCELRVKFSRSADAPAYKQGQNQLYNELNLGRREEYDVLDKRRGRDPEMGGKPRRKNPQEGLYNELQKDKMAEAYSEIGMKGERRRGKGHDGLYQGLSTATKDTYDALHMQALPPR

SEQ ID NO: 8561 - protein, 483 aa, synthetic construct
  REGION 1..483: note = Description of Artificial Sequence: Synthetic polypeptide
MALPVTALLLPLALLLHAARPQVQLVESGGGLVQPGGSLRLSCAVSGFALSNHGMSWVRRAPGKGLEWVSGIVYSGSTYYAASVKGRFTISRDNSRNTLYLQMNSLRPEDTAIYYCSAHGGESDVWGQGTTVTVSSASGGGGSGGRASGGGGSDIRLTQSPSPLSASVGDRVTITCQASEDINKFLNWYHQTPGKAPKLLIYDASTLQTGVPSRFSGSGSGTDFTLTINSLQPEDIGTYYCQQYESLPLTFGGGTKVEIKTTTPAPRPPTPAPTIASQPLSLRPEACRPAAGGAVHTRGLDFACDIYIWAPLAGTCGVLLLSLVITLYCKRGRKKLLYIFKQPFMRPVQTTQEEDGCSCRFPEEEEGGCELRVKFSRSADAPAYKQGQNQLYNELNLGRREEYDVLDKRRGRDPEMGGKPRRKNPQEGLYNELQKDKMAEAYSEIGMKGERRRGKGHDGLYQGLSTATKDTYDALHMQALPPR

SEQ ID NO: 8562 - protein, 484 aa, synthetic construct
  REGION 1..484: note = Description of Artificial Sequence: Synthetic polypeptide
MALPVTALLLPLALLLHAARPEVQLVETGGGLVQPGGSLRLSCAVSGFALSNHGMSWVRRAPGKGLEWVSGIVYSGSTYYAASVKGRFTISRDNSRNTLYLQMNSLRPEDTAIYYCSAHGGESDVWGQGTTVTVSSASGGGGSGGRASGGGGSETTLTQSPATLSVSPGERATLSCRASQSVGSNLAWYQQKPGQGPRLLIYGASTRATGIPARFSGSGSGTEFTLTISSLQPEDFAVYYCQQYNDWLPVTFGQGTKVEIKTTTPAPRPPTPAPTIASQPLSLRPEACRPAAGGAVHTRGLDFACDIYIWAPLAGTCGVLLLSLVITLYCKRGRKKLLYIFKQPFMRPVQTTQEEDGCSCRFPEEEEGGCELRVKFSRSADAPAYKQGQNQLYNELNLGRREEYDVLDKRRGRDPEMGGKPRRKNPQEGLYNELQKDKMAEAYSEIGMKGERRRGKGHDGLYQGLSTATKDTYDALHMQALPPR

SEQ ID NO: 8563 - protein, 485 aa, synthetic construct
  REGION 1..485: note = Description of Artificial Sequence: Synthetic polypeptide
MALPVTALLLPLALLLHAARPEVQLVESGGGLVQPGGSLRLSCAVSGFALSNHGMSWVRRAPGKGLEWVSGIVYSGSTYYAASVKGRFTISRDNSRNTLYLQMNSLRPEDTAIYYCSAHGGESDVWGQGTTVTVSSASGGGGSGGRASGGGGSEIVLTQSPGTLSLSPGERATLSCRASQSIGSSSLAWYQQKPGQAPRLLMYGASSRASGIPDRFSGSGSGTDFTLTISRLEPEDFAVYYCQQYAGSPPFTFGQGTKVEIKTTTPAPRPPTPAPTIASQPLSLRPEACRPAAGGAVHTRGLDFACDIYIWAPLAGTCGVLLLSLVITLYCKRGRKKLLYIFKQPFMRPVQTTQEEDGCSCRFPEEEEGGCELRVKFSRSADAPAYKQGQNQLYNELNLGRREEYDVLDKRRGRDPEMGGKPRRKNPQEGLYNELQKDKMAEAYSEIGMKGERRRGKGHDGLYQGLSTATKDTYDALHMQALPPR

SEQ ID NO: 8564 - DNA, 1470 bp, synthetic construct
  misc_feature 1..1470: note = Description of Artificial Sequence: Synthetic polynucleotide
  source 1..1470: mol_type = other DNA
atggccctccctgtcaccgccctgctgcttccgctggctcttctgctccacgccgctcggccccaagtgcaactcgtggaatctggtggaggactcgtgcaacccggaagatcgcttagactgtcgtgtgccgccagcgggttcactttctcgaactacgcgatgtcctgggtccgccaggcacccggaaagggactcggttgggtgtccggcatttcccggtccggcgaaaatacctactacgccgactccgtgaagggccgcttcaccatctcaagggacaacagcaaaaacaccctgtacttgcaaatgaactccctgcgggatgaagatacagccgtgtactattgcgcccggtcgcctgcccattactacggcggaatggacgtctggggacagggaaccactgtgactgtcagcagcgcgtcgggtggcggcggctcagggggtcgggcctccggggggggagggtccgacatcgtgctgacccagtccccgggaaccctgagcctgagcccgggagagcgcgcgaccctgtcatgccgggcatcccagagcattagctcctcctttctcgcctggtatcagcagaagcccggacaggccccgaggctgctgatctacggcgctagcagaagggctaccggaatcccagaccggttctccggctccggttccgggaccgatttcacccttactatctcgcgcctggaacctgaggactccgccgtctactactgccagcagtaccactcatccccgtcgtggacgttcggacagggcaccaagctggagattaagaccactaccccagcaccgaggccacccaccccggctcctaccatcgcctcccagcctctgtccctgcgtccggaggcatgtagacccgcagctggtggggccgtgcatacccggggtcttgacttcgcctgcgatatctacatttgggcccctctggctggtacttgcggggtcctgctgctttcactcgtgatcactctttactgtaagcgcggtcggaagaagctgctgtacatctttaagcaacccttcatgaggcctgtgcagactactcaagaggaggacggctgttcatgccggttcccagaggaggaggaaggcggctgcgaactgcgcgtgaaattcagccgcagcgcagatgctccagcctacaagcaggggcagaaccagctctacaacgaactcaatcttggtcggagagaggagtacgacgtgctggacaagcggagaggacgggacccagaaatgggcgggaagccgcgcagaaagaatccccaagagggcctgtacaacgagctccaaaaggataagatggcagaagcctatagcgagattggtatgaaaggggaacgcagaagaggcaaaggccacgacggactgtaccagggactcagcaccgccaccaaggacacctatgacgctcttcacatgcaggccctgccgcctcgg

SEQ ID NO: 8565 - DNA, 1464 bp, synthetic construct
  misc_feature 1..1464: note = Description of Artificial Sequence: Synthetic polynucleotide
  source 1..1464: mol_type = other DNA
atggccctccctgtcaccgccctgctgcttccgctggctcttctgctccacgccgctcggccccaagtgcaactcgtcgaatccggtggaggtctggtccaacctggtagaagcctgagactgtcgtgtgcggccagcggattcacctttgatgactatgctatgcactgggtgcggcaggccccaggaaagggcctggaatgggtgtcgggaattagctggaactccgggtccattggctacgccgactccgtgaagggccgcttcaccatctcccgcgacaacgcaaagaactccctgtacttgcaaatgaactcgctcagggctgaggataccgcgctgtactactgctccgtgcattccttcctggcctactggggacagggaactctggtcaccgtgtcgagcgcctccggcggcgggggctcgggtggacgggcctcgggcggaggggggtccgacatcgtgatgacccagaccccgctgagcttgcccgtgactcccggagagcctgcatccatctcctgccggtcatcccagtcccttctccactccaacggatacaactacctcgactggtacctccagaagccgggacagagccctcagcttctgatctacctggggtcaaatagagcctcaggagtgccggatcggttcagcggatctggttcgggaactgatttcactctgaagatttcccgcgtggaagccgaggacgtgggcgtctactactgtatgcaggcgctgcagaccccctataccttcggccaagggacgaaagtggagatcaagaccactaccccagcaccgaggccacccaccccggctcctaccatcgcctcccagcctctgtccctgcgtccggaggcatgtagacccgcagctggtggggccgtgcatacccggggtcttgacttcgcctgcgatatctacatttgggcccctctggctggtacttgcggggtcctgctgctttcactcgtgatcactctttactgtaagcgcggtcggaagaagctgctgtacatctttaagcaacccttcatgaggcctgtgcagactactcaagaggaggacggctgttcatgccggttcccagaggaggaggaaggcggctgcgaactgcgcgtgaaattcagccgcagcgcagatgctccagcctacaagcaggggcagaaccagctctacaacgaactcaatcttggtcggagagaggagtacgacgtgctggacaagcggagaggacgggacccagaaatgggcgggaagccgcgcagaaagaatccccaagagggcctgtacaacgagctccaaaaggataagatggcagaagcctatagcgagattggtatgaaaggggaacgcagaagaggcaaaggccacgacggactgtaccagggactcagcaccgccaccaaggacacctatgacgctcttcacatgcaggccctgccgcctcgg

SEQ ID NO: 8566 - DNA, 1461 bp, synthetic construct
  misc_feature 1..1461: note = Description of Artificial Sequence: Synthetic polynucleotide
  source 1..1461: mol_type = other DNA
atggccctccctgtcaccgccctgctgcttccgctggctcttctgctccacgccgctcggcccgaagtgcaattgttggaatctggaggaggacttgtgcagcctggaggatcactgagactttcgtgtgcggtgtcaggcttcgccctgagcaaccacggcatgagctgggtgcggagagccccggggaagggtctggaatgggtgtccgggatcgtctactccggttcaacttactacgccgcaagcgtgaagggtcgcttcaccatttcccgcgataactcccggaacaccctgtacctccaaatgaactccctgcggcccgaggacaccgccatctactactgttccgcgcatggaggagagtccgatgtctggggacagggcactaccgtgaccgtgtcgagcgcctcggggggaggaggctccggcggtcgcgcctccggggggggtggcagcgacattgtgatgacgcagactccactctcgctgtccgtgaccccgggacagcccgcgtccatctcgtgcaagagctcccagagcctgctgaggaacgacggaaagactcctctgtattggtacctccagaaggctggacagcccccgcaactgctcatctacgaagtgtcaaatcgcttctccggggtgccggatcggttttccggctcgggatcgggcaccgacttcaccctgaaaatctccagggtcgaggccgaggacgtgggagcctactactgcatgcaaaacatccagttcccttccttcggcggcggcacaaagctggagattaagaccactaccccagcaccgaggccacccaccccggctcctaccatcgcctcccagcctctgtccctgcgtccggaggcatgtagacccgcagctggtggggccgtgcatacccggggtcttgacttcgcctgcgatatctacatttgggcccctctggctggtacttgcggggtcctgctgctttcactcgtgatcactctttactgtaagcgcggtcggaagaagctgctgtacatctttaagcaacccttcatgaggcctgtgcagactactcaagaggaggacggctgttcatgccggttcccagaggaggaggaaggcggctgcgaactgcgcgtgaaattcagccgcagcgcagatgctccagcctacaagcaggggcagaaccagctctacaacgaactcaatcttggtcggagagaggagtacgacgtgctggacaagcggagaggacgggacccagaaatgggcgggaagccgcgcagaaagaatccccaagagggcctgtacaacgagctccaaaaggataagatggcagaagcctatagcgagattggtatgaaaggggaacgcagaagaggcaaaggccacgacggactgtaccagggactcagcaccgccaccaaggacacctatgacgctcttcacatgcaggccctgccgcctcgg

SEQ ID NO: 8567 - DNA, 1479 bp, synthetic construct
  misc_feature 1..1479: note = Description of Artificial Sequence: Synthetic polynucleotide
  source 1..1479: mol_type = other DNA
atggccctccctgtcaccgccctgctgcttccgctggctcttctgctccacgccgctcggccccaagtccaactcgtccagtccggcgcagaagtcagaaaaaccggtgctagcgtgaaagtgtcctgcaaggcctccggctacattttcgataacttcggaatcaactgggtcagacaggccccgggccaggggctggaatggatgggatggatcaaccccaagaacaacaacaccaactacgcacagaagttccagggccgcgtgactatcaccgccgatgaatcgaccaataccgcctacatggaggtgtcctccctgcggtcggaggacactgccgtgtattactgcgcgaggggcccatactactaccaaagctacatggacgtctggggacagggaaccatggtgaccgtgtcatccgcctccggtggtggaggctccggggggcgggcttcaggaggcggaggaagcgatattgtgatgacccagactccgcttagcctgcccgtgactcctggagaaccggcctccatttcctgccggtcctcgcaatcactcctgcattccaacggttacaactacctgaattggtacctccagaagcctggccagtcgccccagttgctgatctatctgggctcgaagcgcgcctccggggtgcctgaccggtttagcggatctgggagcggcacggacttcactctccacatcacccgcgtgggagcggaggacgtgggagtgtactactgtatgcaggcgctgcagactccgtacacattcggacagggcaccaagctggagatcaagaccactaccccagcaccgaggccacccaccccggctcctaccatcgcctcccagcctctgtccctgcgtccggaggcatgtagacccgcagctggtggggccgtgcatacccggggtcttgacttcgcctgcgatatctacatttgggcccctctggctggtacttgcggggtcctgctgctttcactcgtgatcactctttactgtaagcgcggtcggaagaagctgctgtacatctttaagcaacccttcatgaggcctgtgcagactactcaagaggaggacggctgttcatgccggttcccagaggaggaggaaggcggctgcgaactgcgcgtgaaattcagccgcagcgcagatgctccagcctacaagcaggggcagaaccagctctacaacgaactcaatcttggtcggagagaggagtacgacgtgctggacaagcggagaggacgggacccagaaatgggcgggaagccgcgcagaaagaatccccaagagggcctgtacaacgagctccaaaaggataagatggcagaagcctatagcgagattggtatgaaaggggaacgcagaagaggcaaaggccacgacggactgtaccagggactcagcaccgccaccaaggacacctatgacgctcttcacatgcaggccctgccgcctcgg

SEQ ID NO: 8568 - DNA, 1470 bp, synthetic construct
  misc_feature 1..1470: note = Description of Artificial Sequence: Synthetic polynucleotide
  source 1..1470: mol_type = other DNA
atggccctccctgtcaccgccctgctgcttccgctggctcttctgctccacgccgctcggccccaagtgcaacttcaagaatcaggcggaggactcgtgcagcccggaggatcattgcggctctcgtgcgccgcctcgggcttcaccttctcgagcgacgccatgacctgggtccgccaggccccggggaaggggctggaatgggtgtctgtgatttccggctccgggggaactacgtactacgccgattccgtgaaaggtcgcttcactatctcccgggacaacagcaagaacaccctttatctgcaaatgaattccctccgcgccgaggacaccgccgtgtactactgcgccaagctggactcctcgggctactactatgcccggggtccgagatactggggacagggaaccctcgtgaccgtgtcctccgcgtccggcggaggagggtcgggagggcgggcctccggcggcggcggttcggacatccagctgacccagtccccatcctcactgagcgcaagcgtgggcgacagagtcaccattacatgcagggcgtcccagagcatcagctcctacctgaactggtaccaacagaagcctggaaaggctcctaagctgttgatctacggggcttcgaccctggcatccggggtgcccgcgaggtttagcggaagcggtagcggcactcacttcactctgaccattaacagcctccagtccgaggattcagccacttactactgtcagcagtcctacaagcgggccagcttcggacagggcactaaggtcgagatcaagaccactaccccagcaccgaggccacccaccccggctcctaccatcgcctcccagcctctgtccctgcgtccggaggcatgtagacccgcagctggtggggccgtgcatacccggggtcttgacttcgcctgcgatatctacatttgggcccctctggctggtacttgcggggtcctgctgctttcactcgtgatcactctttactgtaagcgcggtcggaagaagctgctgtacatctttaagcaacccttcatgaggcctgtgcagactactcaagaggaggacggctgttcatgccggttcccagaggaggaggaaggcggctgcgaactgcgcgtgaaattcagccgcagcgcagatgctccagcctacaagcaggggcagaaccagctctacaacgaactcaatcttggtcggagagaggagtacgacgtgctggacaagcggagaggacgggacccagaaatgggcgggaagccgcgcagaaagaatccccaagagggcctgtacaacgagctccaaaaggataagatggcagaagcctatagcgagattggtatgaaaggggaacgcagaagaggcaaaggccacgacggactgtaccagggactcagcaccgccaccaaggacacctatgacgctcttcacatgcaggccctgccgcctcgg

SEQ ID NO: 8569 - DNA, 1473 bp, synthetic construct
  misc_feature 1..1473: note = Description of Artificial Sequence: Synthetic polynucleotide
  source 1..1473: mol_type = other DNA
atggccctccctgtcaccgccctgctgcttccgctggctcttctgctccacgccgctcggccccaagtccaactggtccagagcggtgcagaagtgaagaagcccggagcgagcgtgaaagtgtcctgcaaggcttccgggtacaccttctccaactacggcatcacttgggtgcgccaggccccgggacagggcctggaatggatggggtggatttccgcgtacaacggcaatacgaactacgctcagaagttccagggtagagtgaccatgactaggaacacctccatttccaccgcctacatggaactgtcctccctgcggagcgaggacaccgccgtgtactattgcgcccggggaccatactactactacatggatgtctgggggaaggggactatggtcaccgtgtcatccgcctcgggaggcggcggatcaggaggacgcgcctctggtggtggaggatcggagatcgtgatgacccagagccctctctccttgcccgtgactcctggggagcccgcatccatttcatgccggagctcccagtcacttctctactccaacggctataactacgtggattggtacctccaaaagccgggccagagcccgcagctgctgatctacctgggctcgaacagggccagcggagtgcctgaccggttctccgggtcgggaagcgggaccgacttcaagctgcaaatctcgagagtggaggccgaggacgtgggaatctactactgtatgcagggccgccagtttccgtactcgttcggacagggcaccaaagtggaaatcaagaccactaccccagcaccgaggccacccaccccggctcctaccatcgcctcccagcctctgtccctgcgtccggaggcatgtagacccgcagctggtggggccgtgcatacccggggtcttgacttcgcctgcgatatctacatttgggcccctctggctggtacttgcggggtcctgctgctttcactcgtgatcactctttactgtaagcgcggtcggaagaagctgctgtacatctttaagcaacccttcatgaggcctgtgcagactactcaagaggaggacggctgttcatgccggttcccagaggaggaggaaggcggctgcgaactgcgcgtgaaattcagccgcagcgcagatgctccagcctacaagcaggggcagaaccagctctacaacgaactcaatcttggtcggagagaggagtacgacgtgctggacaagcggagaggacgggacccagaaatgggcgggaagccgcgcagaaagaatccccaagagggcctgtacaacgagctccaaaaggataagatggcagaagcctatagcgagattggtatgaaaggggaacgcagaagaggcaaaggccacgacggactgtaccagggactcagcaccgccaccaaggacacctatgacgctcttcacatgcaggccctgccgcctcgg

SEQ ID NO: 8570 - DNA, 1446 bp, synthetic construct
  misc_feature 1..1446: note = Description of Artificial Sequence: Synthetic polynucleotide
  source 1..1446: mol_type = other DNA
atggccctccctgtcaccgccctgctgcttccgctggctcttctgctccacgccgctcggcccgaagtgcaattgctcgaaactggaggaggtctggtgcaacctggaggatcacttcgcctgtcctgcgccgtgtcgggctttgccctgtccaaccatggaatgagctgggtccgccgcgcgccggggaagggcctcgaatgggtgtccggcatcgtctactccggctccacctactacgccgcgtccgtgaagggccggttcacgatttcacgggacaactcgcggaacaccctgtacctccaaatgaattcccttcggccggaggatactgccatctactactgctccgcccacggtggcgaatccgacgtctggggccagggaaccaccgtgaccgtgtccagcgcgtccgggggaggaggaagcgggggtagagcatcgggtggaggcggatcagagatcgtgctgacccagtcccccgccaccttgagcgtgtcaccaggagagtccgccaccctgtcatgccgcgccagccagtccgtgtcctccaacctggcttggtaccagcagaagccggggcaggcccctagactcctgatctatggggcgtcgacccgggcatctggaattcccgataggttcagcggatcgggctcgggcactgacttcactctgaccatctcctcgctgcaagccgaggacgtggctgtgtactactgtcagcagtacggaagctccctgactttcggtggcgggaccaaagtcgagattaagaccactaccccagcaccgaggccacccaccccggctcctaccatcgcctcccagcctctgtccctgcgtccggaggcatgtagacccgcagctggtggggccgtgcatacccggggtcttgacttcgcctgcgatatctacatttgggcccctctggctggtacttgcggggtcctgctgctttcactcgtgatcactctttactgtaagcgcggtcggaagaagctgctgtacatctttaagcaacccttcatgaggcctgtgcagactactcaagaggaggacggctgttcatgccggttcccagaggaggaggaaggcggctgcgaactgcgcgtgaaattcagccgcagcgcagatgctccagcctacaagcaggggcagaaccagctctacaacgaactcaatcttggtcggagagaggagtacgacgtgctggacaagcggagaggacgggacccagaaatgggcgggaagccgcgcagaaagaatccccaagagggcctgtacaacgagctccaaaaggataagatggcagaagcctatagcgagattggtatgaaaggggaacgcagaagaggcaaaggccacgacggactgtaccagggactcagcaccgccaccaaggacacctatgacgctcttcacatgcaggccctgccgcctcgg

SEQ ID NO: 8571 - DNA, 1449 bp, synthetic construct
  misc_feature 1..1449: note = Description of Artificial Sequence: Synthetic polynucleotide
  source 1..1449: mol_type = other DNA
atggccctccctgtcaccgccctgctgcttccgctggctcttctgctccacgccgctcggcccgaagtgcaattggtggaaactggaggaggacttgtgcaacctggaggatcattgagactgagctgcgcagtgtcgggattcgccctgagcaaccatggaatgtcctgggtcagaagggcccctggaaaaggcctcgaatgggtgtcagggatcgtgtactccggttccacttactacgccgcctccgtgaaggggcgcttcactatctcacgggataactcccgcaataccctgtacctccaaatgaacagcctgcggccggaggataccgccatctactactgttccgcccacggtggagagtctgacgtctggggccagggaactaccgtgaccgtgtcctccgcgtccggcggtggagggagcggcggccgcgccagcggcggcggaggctccgagatcgtgatgacccagagccccgctactctgtcggtgtcgcccggagaaagggcgaccctgtcctgccgggcgtcgcagtccgtgagcagcaagctggcttggtaccagcagaagccgggccaggcaccacgcctgcttatgtacggtgcctccattcgggccaccggaatcccggaccggttctcggggtcggggtccggtaccgagttcacactgaccatttcctcgctcgagcccgaggactttgccgtctattactgccagcagtacggctcctcctcatggacgttcggccaggggaccaaggtcgaaatcaagaccactaccccagcaccgaggccacccaccccggctcctaccatcgcctcccagcctctgtccctgcgtccggaggcatgtagacccgcagctggtggggccgtgcatacccggggtcttgacttcgcctgcgatatctacatttgggcccctctggctggtacttgcggggtcctgctgctttcactcgtgatcactctttactgtaagcgcggtcggaagaagctgctgtacatctttaagcaacccttcatgaggcctgtgcagactactcaagaggaggacggctgttcatgccggttcccagaggaggaggaaggcggctgcgaactgcgcgtgaaattcagccgcagcgcagatgctccagcctacaagcaggggcagaaccagctctacaacgaactcaatcttggtcggagagaggagtacgacgtgctggacaagcggagaggacgggacccagaaatgggcgggaagccgcgcagaaagaatccccaagagggcctgtacaacgagctccaaaaggataagatggcagaagcctatagcgagattggtatgaaaggggaacgcagaagaggcaaaggccacgacggactgtaccagggactcagcaccgccaccaaggacacctatgacgctcttcacatgcaggccctgccgcctcgg

SEQ ID NO: 8572 - DNA, 1455 bp, synthetic construct
  misc_feature 1..1455: note = Description of Artificial Sequence: Synthetic polynucleotide
  source 1..1455: mol_type = other DNA
atggccctccctgtcaccgccctgctgcttccgctggctcttctgctccacgccgctcggcccgaagtgcaattggtggagactggaggaggagtggtgcaacctggaggaagcctgagactgtcatgcgcggtgtcgggcttcgccctctccaaccacggaatgtcctgggtccgccgggcccctgggaaaggacttgaatgggtgtccggcatcgtgtactcgggttccacctactacgcggcctcagtgaagggccggtttactattagccgcgacaactccagaaacacactgtacctccaaatgaactcgctgcggccggaagataccgctatctactactgctccgcccatgggggagagtcggacgtctggggacagggcaccactgtcactgtgtccagcgcttccggcggtggtggaagcgggggacgggcctcaggaggcggtggcagcgagattgtgctgacccagtcccccgggaccctgagcctgtccccgggagaaagggccaccctctcctgtcgggcatcccagtccgtggggtctactaaccttgcatggtaccagcagaagcccggccaggcccctcgcctgctgatctacgacgcgtccaatagagccaccggcatcccggatcgcttcagcggaggcggatcgggcaccgacttcaccctcaccatttcaaggctggaaccggaggacttcgccgtgtactactgccagcagtatggttcgtccccaccctggacgttcggccaggggactaaggtcgagatcaagaccactaccccagcaccgaggccacccaccccggctcctaccatcgcctcccagcctctgtccctgcgtccggaggcatgtagacccgcagctggtggggccgtgcatacccggggtcttgacttcgcctgcgatatctacatttgggcccctctggctggtacttgcggggtcctgctgctttcactcgtgatcactctttactgtaagcgcggtcggaagaagctgctgtacatctttaagcaacccttcatgaggcctgtgcagactactcaagaggaggacggctgttcatgccggttcccagaggaggaggaaggcggctgcgaactgcgcgtgaaattcagccgcagcgcagatgctccagcctacaagcaggggcagaaccagctctacaacgaactcaatcttggtcggagagaggagtacgacgtgctggacaagcggagaggacgggacccagaaatgggcgggaagccgcgcagaaagaatccccaagagggcctgtacaacgagctccaaaaggataagatggcagaagcctatagcgagattggtatgaaaggggaacgcagaagaggcaaaggccacgacggactgtaccagggactcagcaccgccaccaaggacacctatgacgctcttcacatgcaggccctgccgcctcgg

SEQ ID NO: 8573 - DNA, 1449 bp, synthetic construct
  misc_feature 1..1449: note = Description of Artificial Sequence: Synthetic polynucleotide
  source 1..1449: mol_type = other DNA
atggccctccctgtcaccgccctgctgcttccgctggctcttctgctccacgccgctcggccccaagtgcaactcgtggaatctggtggaggactcgtgaaacctggaggatcattgagactgtcatgcgcggcctcgggattcacgttctccgattactacatgagctggattcgccaggctccggggaagggactggaatgggtgtcctacatttcctcatccggctccaccatctactacgcggactccgtgaaggggagattcaccattagccgcgataacgccaagaacagcctgtaccttcagatgaactccctgcgggctgaagatactgccgtctactactgcgcaagggagagcggagatgggatggacgtctggggacagggtaccactgtgaccgtgtcgtcggcctccggcggagggggttcgggtggaagggccagcggcggcggaggcagcgacatccagatgacccagtccccctcatcgctgtccgcctccgtgggcgaccgcgtcaccatcacatgccgggcctcacagtcgatctcctcctacctcaattggtatcagcagaagcccggaaaggcccctaagcttctgatctacgcagcgtcctccctgcaatccggggtcccatctcggttctccggctcgggcagcggtaccgacttcactctgaccatctcgagcctgcagccggaggacttcgccacttactactgtcagcaaagctacaccctcgcgtttggccagggcaccaaagtggacatcaagaccactaccccagcaccgaggccacccaccccggctcctaccatcgcctcccagcctctgtccctgcgtccggaggcatgtagacccgcagctggtggggccgtgcatacccggggtcttgacttcgcctgcgatatctacatttgggcccctctggctggtacttgcggggtcctgctgctttcactcgtgatcactctttactgtaagcgcggtcggaagaagctgctgtacatctttaagcaacccttcatgaggcctgtgcagactactcaagaggaggacggctgttcatgccggttcccagaggaggaggaaggcggctgcgaactgcgcgtgaaattcagccgcagcgcagatgctccagcctacaagcaggggcagaaccagctctacaacgaactcaatcttggtcggagagaggagtacgacgtgctggacaagcggagaggacgggacccagaaatgggcgggaagccgcgcagaaagaatccccaagagggcctgtacaacgagctccaaaaggataagatggcagaagcctatagcgagattggtatgaaaggggaacgcagaagaggcaaaggccacgacggactgtaccagggactcagcaccgccaccaaggacacctatgacgctcttcacatgcaggccctgccgcctcgg

SEQ ID NO: 8574 - DNA, 1449 bp, synthetic construct
  misc_feature 1..1449: note = Description of Artificial Sequence: Synthetic polynucleotide
  source 1..1449: mol_type = other DNA
atggccctccctgtcaccgccctgctgcttccgctggctcttctgctccacgccgctcggcccgaagtgcaattggtggaatcagggggaggacttgtgcagcctggaggatcgctgagactgtcatgtgccgtgtccggctttgccctgtccaaccacgggatgtcctgggtccgccgcgcgcctggaaagggcctcgaatgggtgtcgggtattgtgtacagcggtagcacctactatgccgcatccgtgaaggggagattcaccatcagccgggacaactccaggaacactctgtacctccaaatgaattcgctgaggccagaggacactgccatctactactgctccgcgcatggcggagagtccgacgtctggggacaggggaccaccgtgaccgtgtctagcgcgtccggcggaggcggcagcgggggtcgggcatcagggggcggcggatcggacatccagctcacccagtccccgagctcgctgtccgcctccgtgggagatcgggtcaccatcacgtgccgcgccagccagtcgatttcctcctacctgaactggtaccaacagaagcccggaaaagccccgaagcttctcatctacgccgcctcgagcctgcagtcaggagtgccctcacggttctccggctccggttccggtactgatttcaccctgaccatttcctccctgcaaccggaggacttcgctacttactactgccagcagtcgtactccaccccctacactttcggacaaggcaccaaggtcgaaatcaagaccactaccccagcaccgaggccacccaccccggctcctaccatcgcctcccagcctctgtccctgcgtccggaggcatgtagacccgcagctggtggggccgtgcatacccggggtcttgacttcgcctgcgatatctacatttgggcccctctggctggtacttgcggggtcctgctgctttcactcgtgatcactctttactgtaagcgcggtcggaagaagctgctgtacatctttaagcaacccttcatgaggcctgtgcagactactcaagaggaggacggctgttcatgccggttcccagaggaggaggaaggcggctgcgaactgcgcgtgaaattcagccgcagcgcagatgctccagcctacaagcaggggcagaaccagctctacaacgaactcaatcttggtcggagagaggagtacgacgtgctggacaagcggagaggacgggacccagaaatgggcgggaagccgcgcagaaagaatccccaagagggcctgtacaacgagctccaaaaggataagatggcagaagcctatagcgagattggtatgaaaggggaacgcagaagaggcaaaggccacgacggactgtaccagggactcagcaccgccaccaaggacacctatgacgctcttcacatgcaggccctgccgcctcgg

SEQ ID NO: 8575 - DNA, 1470 bp, synthetic construct
  misc_feature 1..1470: note = Description of Artificial Sequence: Synthetic polynucleotide
  source 1..1470: mol_type = other DNA
atggccctccctgtcaccgccctgctgcttccgctggctcttctgctccacgccgctcggccccaagtgcaactggtgcaaagcggaggaggattggtcaaacccggaggaagcctgagactgtcatgcgcggcctctggattcaccttctccgattactacatgtcatggatcagacaggccccggggaagggcctcgaatgggtgtcctacatctcgtcctccgggaacaccatctactacgccgacagcgtgaagggccgctttaccatttcccgcgacaacgcaaagaactcgctgtaccttcagatgaattccctgcgggctgaagataccgcggtgtactattgcgcccggtccactatggtccgggaggactactggggacagggcacactcgtgaccgtgtccagcgcgagcgggggtggaggcagcggtggacgcgcctccggcggcggcggttcagacatcgtgctgactcagtcgcccctgtcgctgccggtcaccctgggccaaccggcctcaattagctgcaagtcctcggagagcctggtgcacaactcaggaaagacttacctgaactggttccatcagcggcctggacagtccccacggaggctcatctatgaagtgtccaacagggattcgggggtgcccgaccgcttcactggctccgggtccggcaccgacttcaccttgaaaatctccagagtggaagccgaggacgtgggcgtgtactactgtatgcagggtacccactggcctggaacctttggacaaggaactaagctcgagattaagaccactaccccagcaccgaggccacccaccccggctcctaccatcgcctcccagcctctgtccctgcgtccggaggcatgtagacccgcagctggtggggccgtgcatacccggggtcttgacttcgcctgcgatatctacatttgggcccctctggctggtacttgcggggtcctgctgctttcactcgtgatcactctttactgtaagcgcggtcggaagaagctgctgtacatctttaagcaacccttcatgaggcctgtgcagactactcaagaggaggacggctgttcatgccggttcccagaggaggaggaaggcggctgcgaactgcgcgtgaaattcagccgcagcgcagatgctccagcctacaagcaggggcagaaccagctctacaacgaactcaatcttggtcggagagaggagtacgacgtgctggacaagcggagaggacgggacccagaaatgggcgggaagccgcgcagaaagaatccccaagagggcctgtacaacgagctccaaaaggataagatggcagaagcctatagcgagattggtatgaaaggggaacgcagaagaggcaaaggccacgacggactgtaccagggactcagcaccgccaccaaggacacctatgacgctcttcacatgcaggccctgccgcctcgg

SEQ ID NO: 8576 - DNA, 1449 bp, synthetic construct
  misc_feature 1..1449: note = Description of Artificial Sequence: Synthetic polynucleotide
  source 1..1449: mol_type = other DNA
atggccctccctgtcaccgccctgctgcttccgctggctcttctgctccacgccgctcggccccaagtgcaactcgtggaatctggtggaggactcgtgcaacccggtggaagccttaggctgtcgtgcgccgtcagcgggtttgctctgagcaaccatggaatgtcctgggtccgccgggcaccgggaaaagggctggaatgggtgtccggcatcgtgtacagcgggtcaacctattacgccgcgtccgtgaagggcagattcactatctcaagagacaacagccggaacaccctgtacttgcaaatgaattccctgcgccccgaggacaccgccatctactactgctccgcccacggaggagagtcggacgtgtggggccagggaacgactgtgactgtgtccagcgcatcaggagggggtggttcgggcggccgggcctcggggggaggaggttccgacattcggctgacccagtccccgtccccactgtcggcctccgtcggcgaccgcgtgaccatcacttgtcaggcgtccgaggacattaacaagttcctgaactggtaccaccagacccctggaaaggcccccaagctgctgatctacgatgcctcgacccttcaaactggagtgcctagccggttctccgggtccggctccggcactgatttcactctgaccatcaactcattgcagccggaagatatcgggacctactattgccagcagtacgaatccctcccgctcacattcggcgggggaaccaaggtcgagattaagaccactaccccagcaccgaggccacccaccccggctcctaccatcgcctcccagcctctgtccctgcgtccggaggcatgtagacccgcagctggtggggccgtgcatacccggggtcttgacttcgcctgcgatatctacatttgggcccctctggctggtacttgcggggtcctgctgctttcactcgtgatcactctttactgtaagcgcggtcggaagaagctgctgtacatctttaagcaacccttcatgaggcctgtgcagactactcaagaggaggacggctgttcatgccggttcccagaggaggaggaaggcggctgcgaactgcgcgtgaaattcagccgcagcgcagatgctccagcctacaagcaggggcagaaccagctctacaacgaactcaatcttggtcggagagaggagtacgacgtgctggacaagcggagaggacgggacccagaaatgggcgggaagccgcgcagaaagaatccccaagagggcctgtacaacgagctccaaaaggataagatggcagaagcctatagcgagattggtatgaaaggggaacgcagaagaggcaaaggccacgacggactgtaccagggactcagcaccgccaccaaggacacctatgacgctcttcacatgcaggccctgccgcctcgg

SEQ ID NO: 8577 - DNA, 1452 bp, synthetic construct
  misc_feature 1..1452: note = Description of Artificial Sequence: Synthetic polynucleotide
  source 1..1452: mol_type = other DNA
atggccctccctgtcaccgccctgctgcttccgctggctcttctgctccacgccgctcggcccgaagtgcaattggtggaaactggaggaggacttgtgcaacctggaggatcattgcggctctcatgcgctgtctccggcttcgccctgtcaaatcacgggatgtcgtgggtcagacgggccccgggaaagggtctggaatgggtgtcggggattgtgtacagcggctccacctactacgccgcttcggtcaagggccgcttcactatttcacgggacaacagccgcaacaccctctatctgcaaatgaactctctccgcccggaggataccgccatctactactgctccgcacacggcggcgaatccgacgtgtggggacagggaaccactgtcaccgtgtcgtccgcatccggtggcggaggatcgggtggccgggcctccgggggcggcggcagcgagactaccctgacccagtcccctgccactctgtccgtgagcccgggagagagagccacccttagctgccgggccagccagagcgtgggctccaacctggcctggtaccagcagaagccaggacagggtcccaggctgctgatctacggagcctccactcgcgcgaccggcatccccgcgaggttctccgggtcgggttccgggaccgagttcaccctgaccatctcctccctccaaccggaggacttcgcggtgtactactgtcagcagtacaacgattggctgcccgtgacatttggacaggggacgaaggtggaaatcaaaaccactaccccagcaccgaggccacccaccccggctcctaccatcgcctcccagcctctgtccctgcgtccggaggcatgtagacccgcagctggtggggccgtgcatacccggggtcttgacttcgcctgcgatatctacatttgggcccctctggctggtacttgcggggtcctgctgctttcactcgtgatcactctttactgtaagcgcggtcggaagaagctgctgtacatctttaagcaacccttcatgaggcctgtgcagactactcaagaggaggacggctgttcatgccggttcccagaggaggaggaaggcggctgcgaactgcgcgtgaaattcagccgcagcgcagatgctccagcctacaagcaggggcagaaccagctctacaacgaactcaatcttggtcggagagaggagtacgacgtgctggacaagcggagaggacgggacccagaaatgggcgggaagccgcgcagaaagaatccccaagagggcctgtacaacgagctccaaaaggataagatggcagaagcctatagcgagattggtatgaaaggggaacgcagaagaggcaaaggccacgacggactgtaccagggactcagcaccgccaccaaggacacctatgacgctcttcacatgcaggccctgccgcctcgg

SEQ ID NO: 8578 - DNA, 1455 bp, synthetic construct
  misc_feature 1..1455: note = Description of Artificial Sequence: Synthetic polynucleotide
  source 1..1455: mol_type = other DNA
atggccctccctgtcaccgccctgctgcttccgctggctcttctgctccacgccgctcggcccgaagtgcaattggtggaatctggtggaggacttgtgcaacctggaggatcactgagactgtcatgcgcggtgtccggttttgccctgagcaatcatgggatgtcgtgggtccggcgcgcccccggaaagggtctggaatgggtgtcgggtatcgtctactccgggagcacttactacgccgcgagcgtgaagggccgcttcaccatttcccgcgataactcccgcaacaccctgtacttgcaaatgaactcgctccggcctgaggacactgccatctactactgctccgcacacggaggagaatccgacgtgtggggccagggaactaccgtgaccgtcagcagcgcctccggcggcgggggctcaggcggacgggctagcggcggcggtggctccgagatcgtgctgacccagtcgcctggcactctctcgctgagccccggggaaagggcaaccctgtcctgtcgggccagccagtccattggatcatcctccctcgcctggtatcagcagaaaccgggacaggctccgcggctgcttatgtatggggccagctcaagagcctccggcattcccgaccggttctccgggtccggttccggcaccgatttcaccctgactatctcgaggctggagccagaggacttcgccgtgtactactgccagcagtacgcggggtccccgccgttcacgttcggacagggaaccaaggtcgagatcaagaccactaccccagcaccgaggccacccaccccggctcctaccatcgcctcccagcctctgtccctgcgtccggaggcatgtagacccgcagctggtggggccgtgcatacccggggtcttgacttcgcctgcgatatctacatttgggcccctctggctggtacttgcggggtcctgctgctttcactcgtgatcactctttactgtaagcgcggtcggaagaagctgctgtacatctttaagcaacccttcatgaggcctgtgcagactactcaagaggaggacggctgttcatgccggttcccagaggaggaggaaggcggctgcgaactgcgcgtgaaattcagccgcagcgcagatgctccagcctacaagcaggggcagaaccagctctacaacgaactcaatcttggtcggagagaggagtacgacgtgctggacaagcggagaggacgggacccagaaatgggcgggaagccgcgcagaaagaatccccaagagggcctgtacaacgagctccaaaaggataagatggcagaagcctatagcgagattggtatgaaaggggaacgcagaagaggcaaaggccacgacggactgtaccagggactcagcaccgccaccaaggacacctatgacgctcttcacatgcaggccctgccgcctcgg

SEQ ID NO: 8579 - protein, 487 aa, synthetic construct
  REGION 1..487: note = Description of Artificial Sequence: Synthetic polypeptide
MALPVTALLLPLALLLHAARPQVQLQESGPGLVKPSETLSLTCTVSGGSISSSYYYWGWIRQPPGKGLEWIGSIYYSGSAYYNPSLKSRVTISVDTSKNQFSLRLSSVTAADTAVYYCARHWQEWPDAFDIWGQGTMVTVSSGGGGSGGGGSGGGGSETTLTQSPAFMSATPGDKVIISCKASQDIDDAMNWYQQKPGEAPLFIIQSATSPVPGIPPRFSGSGFGTDFSLTINNIESEDAAYYFCLQHDNFPLTFGQGTKLEIKTTTPAPRPPTPAPTIASQPLSLRPEACRPAAGGAVHTRGLDFACDIYIWAPLAGTCGVLLLSLVITLYCKRGRKKLLYIFKQPFMRPVQTTQEEDGCSCRFPEEEEGGCELRVKFSRSADAPAYKQGQNQLYNELNLGRREEYDVLDKRRGRDPEMGGKPRRKNPQEGLYNELQKDKMAEAYSEIGMKGERRRGKGHDGLYQGLSTATKDTYDALHMQALPPR

SEQ ID NO: 8580 - protein, 489 aa, synthetic construct
  REGION 1..489: note = Description of Artificial Sequence: Synthetic polypeptide
MALPVTALLLPLALLLHAARPQVNLRESGPALVKPTQTLTLTCTFSGFSLRTSGMCVSWIRQPPGKALEWLARIDWDEDKFYSTSLKTRLTISKDTSDNQVVLRMTNMDPADTATYYCARSGAGGTSATAFDIWGPGTMVTVSSGGGGSGGGGSGGGGSDIQMTQSPSSLSASVGDRVTITCRASQDIYNNLAWFQLKPGSAPRSLMYAANKSQSGVPSRFSGSASGTDFTLTISSLQPEDFATYYCQHYYRFPYSFGQGTKLEIKTTTPAPRPPTPAPTIASQPLSLRPEACRPAAGGAVHTRGLDFACDIYIWAPLAGTCGVLLLSLVITLYCKRGRKKLLYIFKQPFMRPVQTTQEEDGCSCRFPEEEEGGCELRVKFSRSADAPAYKQGQNQLYNELNLGRREEYDVLDKRRGRDPEMGGKPRRKNPQEGLYNELQKDKMAEAYSEIGMKGERRRGKGHDGLYQGLSTATKDTYDALHMQALPPR

SEQ ID NO: 8581 - protein, 490 aa, synthetic construct
  REGION 1..490: note = Description of Artificial Sequence: Synthetic polypeptide
MALPVTALLLPLALLLHAARPEVQLVESGGGLVKPGGSLRLSCAASGFTFSSYSMNWVRQAPGKGLEWVSSISSSSSYIYYADSVKGRFTISRDNAKNSLYLQMNSLRAEDTAVYYCAKTIAAVYAFDIWGQGTTVTVSSGGGGSGGGGSGGGGSEIVLTQSPLSLPVTPEEPASISCRSSQSLLHSNGYNYLDWYLQKPGQSPQLLIYLGSNRASGVPDRFSGSGSGTDFTLKISRVEAEDVGVYYCMQALQTPYTFGQGTKLEIKTTTPAPRPPTPAPTIASQPLSLRPEACRPAAGGAVHTRGLDFACDIYIWAPLAGTCGVLLLSLVITLYCKRGRKKLLYIFKQPFMRPVQTTQEEDGCSCRFPEEEEGGCELRVKFSRSADAPAYKQGQNQLYNELNLGRREEYDVLDKRRGRDPEMGGKPRRKNPQEGLYNELQKDKMAEAYSEIGMKGERRRGKGHDGLYQGLSTATKDTYDALHMQALPPR

SEQ ID NO: 8582 - protein, 484 aa, synthetic construct
  REGION 1..484: note = Description of Artificial Sequence: Synthetic polypeptide
MALPVTALLLPLALLLHAARPEVQLVESGGGLVKPGGSLRLSCAASGFTFSDYYMSWIRQAPGKGLEWVSYISSSGSTIYYADSVKGRFTISRDNAKNSLYLQMNSLRAEDTAVYYCARDLRGAFDIWGQGTMVTVSSGGGGSGGGGSGGGGSSYVLTQSPSVSAAPGYTATISCGGNNIGTKSVHWYQQKPGQAPLLVIRDDSVRPSKIPGRFSGSNSGNMATLTISGVQAGDEADFYCQVWDSDSEHVVFGGGTKLTVLTTTPAPRPPTPAPTIASQPLSLRPEACRPAAGGAVHTRGLDFACDIYIWAPLAGTCGVLLLSLVITLYCKRGRKKLLYIFKQPFMRPVQTTQEEDGCSCRFPEEEEGGCELRVKFSRSADAPAYKQGQNQLYNELNLGRREEYDVLDKRRGRDPEMGGKPRRKNPQEGLYNELQKDKMAEAYSEIGMKGERRRGKGHDGLYQGLSTATKDTYDALHMQALPPR

SEQ ID NO: 8583 - protein, 485 aa, synthetic construct
  REGION 1..485: note = Description of Artificial Sequence: Synthetic polypeptide
MALPVTALLLPLALLLHAARPQVQLVQSGAEVKKPGASVKVSCKPSGYTVTSHYIHWVRRAPGQGLEWMGMINPSGGVTAYSQTLQGRVTMTSDTSSSTVYMELSSLRSEDTAMYYCAREGSGSGWYFDFWGRGTLVTVSSGGGGSGGGGSGGGGSSYVLTQPPSVSVSPGQTASITCSGDGLSKKYVSWYQQKAGQSPVVLISRDKERPSGIPDRFSGSNSADTATLTISGTQAMDEADYYCQAWDDTTVVFGGGTKLTVLTTTPAPRPPTPAPTIASQPLSLRPEACRPAAGGAVHTRGLDFACDIYIWAPLAGTCGVLLLSLVITLYCKRGRKKLLYIFKQPFMRPVQTTQEEDGCSCRFPEEEEGGCELRVKFSRSADAPAYKQGQNQLYNELNLGRREEYDVLDKRRGRDPEMGGKPRRKNPQEGLYNELQKDKMAEAYSEIGMKGERRRGKGHDGLYQGLSTATKDTYDALHMQALPPR

SEQ ID NO: 8584 - protein, 489 aa, synthetic construct
  REGION 1..489: note = Description of Artificial Sequence: Synthetic polypeptide
MALPVTALLLPLALLLHAARPQVQLQESGPGLVKPSQTLSLTCTVSGGSISSGGYYWSWIRQHPGKGLEWIGYIYYSGSTYYNPSLKSRVTISVDTSKNQFSLKLSSVTAADTAVYYCARAGIAARLRGAFDIWGQGTMVTVSSGGGGSGGGGSGGGGSDIVMTQSPSSVSASVGDRVIITCRASQGIRNWLAWYQQKPGKAPNLLIYAASNLQSGVPSRFSGSGSGADFTLTISSLQPEDVATYYCQKYNSAPFTFGPGTKVDIKTTTPAPRPPTPAPTIASQPLSLRPEACRPAAGGAVHTRGLDFACDIYIWAPLAGTCGVLLLSLVITLYCKRGRKKLLYIFKQPFMRPVQTTQEEDGCSCRFPEEEEGGCELRVKFSRSADAPAYKQGQNQLYNELNLGRREEYDVLDKRRGRDPEMGGKPRRKNPQEGLYNELQKDKMAEAYSEIGMKGERRRGKGHDGLYQGLSTATKDTYDALHMQALPPR

SEQ ID NO: 8585 - protein, 497 aa, synthetic construct
  REGION 1..497: note = Description of Artificial Sequence: Synthetic polypeptide
MALPVTALLLPLALLLHAARPQVQLVQSGAEVKKPGSSVKVSCKASGGTFSSYAISWVRQAPGQGLEWMGGIIPIFGTANYAQKFQGRVTITADESTSTAYMELSSLRSEDTAVYYCARRGGYQLLRWDVGLLRSAFDIWGQGTMVTVSSGGGGSGGGGSGGGGSSYVLTQPPSVSVAPGQTARITCGGNNIGSKSVHWYQQKPGQAPVLVLYGKNNRPSGVPDRFSGSRSGTTASLTITGAQAEDEADYYCSSRDSSGDHLRVFGTGTKVTVLTTTPAPRPPTPAPTIASQPLSLRPEACRPAAGGAVHTRGLDFACDIYIWAPLAGTCGVLLLSLVITLYCKRGRKKLLYIFKQPFMRPVQTTQEEDGCSCRFPEEEEGGCELRVKFSRSADAPAYKQGQNQLYNELNLGRREEYDVLDKRRGRDPEMGGKPRRKNPQEGLYNELQKDKMAEAYSEIGMKGERRRGKGHDGLYQGLSTATKDTYDALHMQALPPR

SEQ ID NO: 8586 - protein, 492 aa, synthetic construct
  REGION 1..492: note = Description of Artificial Sequence: Synthetic polypeptide
MALPVTALLLPLALLLHAARPEVQLQQSGPGLVKPSQTLSLTCAISGDSVSSNSAAWNWIRQSPSRGLEWLGRTYYRSKWYSFYAISLKSRIIINPDTSKNQFSLQLKSVTPEDTAVYYCARSSPEGLFLYWFDPWGQGTLVTVSSGGDGSGGGGSGGGGSSSELTQDPAVSVALGQTIRITCQGDSLGNYYATWYQQKPGQAPVLVIYGTNNRPSGIPDRFSASSSGNTASLTITGAQAEDEADYYCNSRDSSGHHLLFGTGTKVTVLTTTPAPRPPTPAPTIASQPLSLRPEACRPAAGGAVHTRGLDFACDIYIWAPLAGTCGVLLLSLVITLYCKRGRKKLLYIFKQPFMRPVQTTQEEDGCSCRFPEEEEGGCELRVKFSRSADAPAYKQGQNQLYNELNLGRREEYDVLDKRRGRDPEMGGKPRRKNPQEGLYNELQKDKMAEAYSEIGMKGERRRGKGHDGLYQGLSTATKDTYDALHMQALPPR

SEQ ID NO: 8587 - protein, 490 aa, synthetic construct
  REGION 1..490: note = Description of Artificial Sequence: Synthetic polypeptide
MALPVTALLLPLALLLHAARPEVQLVESGGGLVQPGGSLRLSCAASGFTFSSYAMSWVRQAPGKGLEWVSAISGSGGSTYYADSVKGRFTISRDNSKNTLYLQMNSLRAEDTAVYYCAKVEGSGSLDYWGQGTLVTVSSGGGGSGGGGSGGGGSEIVMTQSPGTLSLSPGERATLSCRASQSVSSAYLAWYQQKPGQPPRLLISGASTRATGIPDRFGGSGSGTDFTLTISRLEPEDFAVYYCQHYGSSFNGSSLFTFGQGTRLEIKTTTPAPRPPTPAPTIASQPLSLRPEACRPAAGGAVHTRGLDFACDIYIWAPLAGTCGVLLLSLVITLYCKRGRKKLLYIFKQPFMRPVQTTQEEDGCSCRFPEEEEGGCELRVKFSRSADAPAYKQGQNQLYNELNLGRREEYDVLDKRRGRDPEMGGKPRRKNPQEGLYNELQKDKMAEAYSEIGMKGERRRGKGHDGLYQGLSTATKDTYDALHMQALPPR

SEQ ID NO: 8588 - protein, 485 aa, synthetic construct
  REGION 1..485: note = Description of Artificial Sequence: Synthetic polypeptide
MALPVTALLLPLALLLHAARPEVQLVETGGGLVQPGGSLRLSCAASGITFSRYPMSWVRQAPGKGLEWVSGISDSGVSTYYADSAKGRFTISRDNSKNTLFLQMSSLRDEDTAVYYCVTRAGSEASDIWGQGTMVTVSSGGGGSGGGGSGGGGSEIVLTQSPATLSLSPGERATLSCRASQSVSNSLAWYQQKPGQAPRLLIYDASSRATGIPDRFSGSGSGTDFTLTISRLEPEDFAIYYCQQFGTSSGLTFGGGTKLEIKTTTPAPRPPTPAPTIASQPLSLRPEACRPAAGGAVHTRGLDFACDIYIWAPLAGTCGVLLLSLVITLYCKRGRKKLLYIFKQPFMRPVQTTQEEDGCSCRFPEEEEGGCELRVKFSRSADAPAYKQGQNQLYNELNLGRREEYDVLDKRRGRDPEMGGKPRRKNPQEGLYNELQKDKMAEAYSEIGMKGERRRGKGHDGLYQGLSTATKDTYDALHMQALPPR

SEQ ID NO: 8589 - protein, 492 aa, synthetic construct
  REGION 1..492: note = Description of Artificial Sequence: Synthetic polypeptide
MALPVTALLLPLALLLHAARPQVQLVESGGGLVQPGGSLRLSCAASGFTFSSYAMSWVRQAPGKGLEWVSAISGSGGSTYYADSVKGRFTISRDNAKNSLYLQMNSLRAEDTAIYYCARATYKRELRYYYGMDVWGQGTMVTVSSGGGGSGGGGSGGGGSEIVMTQSPGTVSLSPGERATLSCRASQSVSSSFLAWYQQKPGQAPRLLIYGASSRATGIPDRFSGSGSGTDFTLTISRLEPEDSAVYYCQQYHSSPSWTFGQGTRLEIKTTTPAPRPPTPAPTIASQPLSLRPEACRPAAGGAVHTRGLDFACDIYIWAPLAGTCGVLLLSLVITLYCKRGRKKLLYIFKQPFMRPVQTTQEEDGCSCRFPEEEEGGCELRVKFSRSADAPAYKQGQNQLYNELNLGRREEYDVLDKRRGRDPEMGGKPRRKNPQEGLYNELQKDKMAEAYSEIGMKGERRRGKGHDGLYQGLSTATKDTYDALHMQALPPR

SEQ ID NO: 8590 - protein, 492 aa, synthetic construct
  REGION 1..492: note = Description of Artificial Sequence: Synthetic polypeptide
MALPVTALLLPLALLLHAARPEVQLVETGGGLVQPGGSLRLSCAASGFTFSSYAMSWVRQAPGKGLEWVSAISGSGGSTYYADSVKGRFTISRDNSKNTLYLQMNTLKAEDTAVYYCARATYKRELRYYYGMDVWGQGTTVTVSSGGGGSGGGGSGGGGSEIVLTQSPSTLSLSPGESATLSCRASQSVSTTFLAWYQQKPGQAPRLLIYGSSNRATGIPDRFSGSGSGTDFTLTIRRLEPEDFAVYYCQQYHSSPSWTFGQGTKVEIKTTTPAPRPPTPAPTIASQPLSLRPEACRPAAGGAVHTRGLDFACDIYIWAPLAGTCGVLLLSLVITLYCKRGRKKLLYIFKQPFMRPVQTTQEEDGCSCRFPEEEEGGCELRVKFSRSADAPAYKQGQNQLYNELNLGRREEYDVLDKRRGRDPEMGGKPRRKNPQEGLYNELQKDKMAEAYSEIGMKGERRRGKGHDGLYQGLSTATKDTYDALHMQALPPR

SEQ ID NO: 8591 - protein, 483 aa, synthetic construct
  REGION 1..483: note = Description of Artificial Sequence: Synthetic polypeptide
MALPVTALLLPLALLLHAARPEVQLVETGGGLVQPGRSLRLSCAASGFTFDDYAMHWVRQAPGKGLEWVSGISWNSGSIGYADSVKGRFTISRDNAKNSLYLQMNSLRDEDTAVYYCARVGKAVPDVWGQGTTVTVSSGGGGSGGGGSGGGGSDIVMTQTPSSLSASVGDRVTITCRASQSISSYLNWYQQKPGKAPKLLIYAASSLQSGVPSRFSGSGSGTDFTLTISSLQPEDFATYYCQQSYSTPYSFGQGTRLEIKTTTPAPRPPTPAPTIASQPLSLRPEACRPAAGGAVHTRGLDFACDIYIWAPLAGTCGVLLLSLVITLYCKRGRKKLLYIFKQPFMRPVQTTQEEDGCSCRFPEEEEGGCELRVKFSRSADAPAYKQGQNQLYNELNLGRREEYDVLDKRRGRDPEMGGKPRRKNPQEGLYNELQKDKMAEAYSEIGMKGERRRGKGHDGLYQGLSTATKDTYDALHMQALPPR

SEQ ID NO: 8592 - protein, 490 aa, synthetic construct
  REGION 1..490: note = Description of Artificial Sequence: Synthetic polypeptide
MALPVTALLLPLALLLHAARPEVQLVESGGGLVQPGRSLRLSCTASGFTFDDYAMHWVRQRPGKGLEWVASINWKGNSLAYGDSVKGRFAISRDNAKNTVFLQMNSLRTEDTAVYYCASHQGVAYYNYAMDVWGRGTLVTVSSGGGGSGGGGSGGGGSEIVLTQSPGTLSLSPGERATLSCRATQSIGSSFLAWYQQRPGQAPRLLIYGASQRATGIPDRFSGRGSGTDFTLTISRVEPEDSAVYYCQHYESSPSWTFGQGTKVEIKTTTPAPRPPTPAPTIASQPLSLRPEACRPAAGGAVHTRGLDFACDIYIWAPLAGTCGVLLLSLVITLYCKRGRKKLLYIFKQPFMRPVQTTQEEDGCSCRFPEEEEGGCELRVKFSRSADAPAYKQGQNQLYNELNLGRREEYDVLDKRRGRDPEMGGKPRRKNPQEGLYNELQKDKMAEAYSEIGMKGERRRGKGHDGLYQGLSTATKDTYDALHMQALPPR

SEQ ID NO: 8593 - protein, 485 aa, synthetic construct
  REGION 1..485: note = Description of Artificial Sequence: Synthetic polypeptide
MALPVTALLLPLALLLHAARPEVQLVESGGGLVQPGGSLRLSCAASGFTFSSYAMSWVRQAPGKGLEWVSAISGSGGSTYYADSVKGRFTISRDNSKNTLYLQMNSLRAEDTAVYYCAKVVRDGMDVWGQGTTVTVSSGGGGSGGGGSGGGGSEIVLTQSPATLSLSPGERATLSCRASQSVSSSYLAWYQQKPGQAPRLLIYGASSRATGIPDRFSGNGSGTDFTLTISRLEPEDFAVYYCQQYGSPPRFTFGPGTKVDIKTTTPAPRPPTPAPTIASQPLSLRPEACRPAAGGAVHTRGLDFACDIYIWAPLAGTCGVLLLSLVITLYCKRGRKKLLYIFKQPFMRPVQTTQEEDGCSCRFPEEEEGGCELRVKFSRSADAPAYKQGQNQLYNELNLGRREEYDVLDKRRGRDPEMGGKPRRKNPQEGLYNELQKDKMAEAYSEIGMKGERRRGKGHDGLYQGLSTATKDTYDALHMQALPPR

SEQ ID NO: 8594 - protein, 486 aa, synthetic construct
  REGION 1..486: note = Description of Artificial Sequence: Synthetic polypeptide
MALPVTALLLPLALLLHAARPEVQLLESGGGLVQPGGSLRLSCAASGFTFSSYAMSWVRQAPGKGLEWVSAISGSGGSTYYADSVKGRFTISRDNSKNTLYLQMNSLRAEDTAVYYCAKIPQTGTFDYWGQGTLVTVSSGGGGSGGGGSGGGGSEIVLTQSPGTLSLSPGERATLSCRASQSVSSSYLAWYQQRPGQAPRLLIYGASSRATGIPDRFSGSGSGTDFTLTISRLEPEDFAVYYCQHYGSSPSWTFGQGTRLEIKTTTPAPRPPTPAPTIASQPLSLRPEACRPAAGGAVHTRGLDFACDIYIWAPLAGTCGVLLLSLVITLYCKRGRKKLLYIFKQPFMRPVQTTQEEDGCSCRFPEEEEGGCELRVKFSRSADAPAYKQGQNQLYNELNLGRREEYDVLDKRRGRDPEMGGKPRRKNPQEGLYNELQKDKMAEAYSEIGMKGERRRGKGHDGLYQGLSTATKDTYDALHMQALPPR

SEQ ID NO: 8595 - protein, 492 aa, synthetic construct
  REGION 1..492: note = Description of Artificial Sequence: Synthetic polypeptide
MALPVTALLLPLALLLHAARPEVQLVETGGGLVQPGGSLRLSCAASGFTFSSYAMSWVRQAPGKGLEWVSAISGSGGSTYYADSVKGRFTMSRENDKNSVFLQMNSLRVEDTGVYYCARANYKRELRYYYGMDVWGQGTMVTVSSGGGGSGGGGSGGGGSEIVMTQSPGTLSLSPGESATLSCRASQRVASNYLAWYQHKPGQAPSLLISGASSRATGVPDRFSGSGSGTDFTLAISRLEPEDSAVYYCQHYDSSPSWTFGQGTKVEIKTTTPAPRPPTPAPTIASQPLSLRPEACRPAAGGAVHTRGLDFACDIYIWAPLAGTCGVLLLSLVITLYCKRGRKKLLYIFKQPFMRPVQTTQEEDGCSCRFPEEEEGGCELRVKFSRSADAPAYKQGQNQLYNELNLGRREEYDVLDKRRGRDPEMGGKPRRKNPQEGLYNELQKDKMAEAYSEIGMKGERRRGKGHDGLYQGLSTATKDTYDALHMQALPPR

SEQ ID NO: 8596 - protein, 488 aa, synthetic construct
  REGION 1..488: note = Description of Artificial Sequence: Synthetic polypeptide
MALPVTALLLPLALLLHAARPEVQLLETGGGLVQPGGSLRLSCAASGFSFSSYAMSWVRQAPGKGLEWVSAISGSGGSTYYADSVKGRFTISRDNSKNTLYLQMNSLRAEDTAVYYCAKALVGATGAFDIWGQGTLVTVSSGGGGSGGGGSGGGGSEIVLTQSPGTLSLSPGERATLSCRASQSLSSNFLAWYQQKPGQAPGLLIYGASNWATGTPDRFSGSGSGTDFTLTITRLEPEDFAVYYCQYYGTSPMYTFGQGTKVEIKTTTPAPRPPTPAPTIASQPLSLRPEACRPAAGGAVHTRGLDFACDIYIWAPLAGTCGVLLLSLVITLYCKRGRKKLLYIFKQPFMRPVQTTQEEDGCSCRFPEEEEGGCELRVKFSRSADAPAYKQGQNQLYNELNLGRREEYDVLDKRRGRDPEMGGKPRRKNPQEGLYNELQKDKMAEAYSEIGMKGERRRGKGHDGLYQGLSTATKDTYDALHMQALPPR

SEQ ID NO: 8597 - protein, 488 aa, synthetic construct
  REGION 1..488: note = Description of Artificial Sequence: Synthetic polypeptide
MALPVTALLLPLALLLHAARPEVQLLESGGGLVQPGGSLRLSCAASGFTFSSYAMSWVRQAPGKGLEWVSAISGSGGSTYYADSVKGRFTISRDNSKNTLYLQMNSLRAEDTAVYYCVLWFGEGFDPWGQGTLVTVSSGGGGSGGGGSGGGGSDIVLTQSPLSLPVTPGEPASISCRSSQSLLHSNGYNYLDWYLQKPGQSPQLLIYLGSNRASGVPDRFSGSGSGTDFTLKISRVEAEDVGVYYCMQALQTPLTFGGGTKVDIKTTTPAPRPPTPAPTIASQPLSLRPEACRPAAGGAVHTRGLDFACDIYIWAPLAGTCGVLLLSLVITLYCKRGRKKLLYIFKQPFMRPVQTTQEEDGCSCRFPEEEEGGCELRVKFSRSADAPAYKQGQNQLYNELNLGRREEYDVLDKRRGRDPEMGGKPRRKNPQEGLYNELQKDKMAEAYSEIGMKGERRRGKGHDGLYQGLSTATKDTYDALHMQALPPR

SEQ ID NO: 8598 - protein, 495 aa, synthetic construct
  REGION 1..495: note = Description of Artificial Sequence: Synthetic polypeptide
MALPVTALLLPLALLLHAARPQVQLVESGGGLVQPGGSLRLSCAASGFTFSSYAMSWVRQAPGKGLEWVSAISGSGGSTYYADSVKGRFTISRDNSKNTLYLQMNSLRAEDTAVYYCAKVGYDSSGYYRDYYGMDVWGQGTTVTVSSGGGGSGGGGSGGGGSEIVLTQSPGTLSLSPGERATLSCRASQSVSSSYLAWYQQKPGQAPRLLIYGTSSRATGISDRFSGSGSGTDFTLTISRLEPEDFAVYYCQHYGNSPPKFTFGPGTKLEIKTTTPAPRPPTPAPTIASQPLSLRPEACRPAAGGAVHTRGLDFACDIYIWAPLAGTCGVLLLSLVITLYCKRGRKKLLYIFKQPFMRPVQTTQEEDGCSCRFPEEEEGGCELRVKFSRSADAPAYKQGQNQLYNELNLGRREEYDVLDKRRGRDPEMGGKPRRKNPQEGLYNELQKDKMAEAYSEIGMKGERRRGKGHDGLYQGLSTATKDTYDALHMQALPPR

SEQ ID NO: 8599 - protein, 490 aa, synthetic construct
  REGION 1..490: note = Description of Artificial Sequence: Synthetic polypeptide
MALPVTALLLPLALLLHAARPEVQLVESGGGLVQPGGSLRLSCAASGFTFSSYAMSWVRQAPGKGLEWVSAISGSGGSTYYADSVKGRFTISRDNSKNTLYLQMNSLRAEDTAVYYCAKMGWSSGYLGAFDIWGQGTTVTVSSGGGGSGGGGSGGGGSEIVLTQSPGTLSLSPGERATLSCRASQSVASSFLAWYQQKPGQAPRLLIYGASGRATGIPDRFSGSGSGTDFTLTISRLEPEDFAVYYCQHYGGSPRLTFGGGTKVDIKTTTPAPRPPTPAPTIASQPLSLRPEACRPAAGGAVHTRGLDFACDIYIWAPLAGTCGVLLLSLVITLYCKRGRKKLLYIFKQPFMRPVQTTQEEDGCSCRFPEEEEGGCELRVKFSRSADAPAYKQGQNQLYNELNLGRREEYDVLDKRRGRDPEMGGKPRRKNPQEGLYNELQKDKMAEAYSEIGMKGERRRGKGHDGLYQGLSTATKDTYDALHMQALPPR

SEQ ID NO: 8600 - skipped

SEQ ID NO: 8601 - DNA, 1461 bp, synthetic construct
  misc_feature 1..1461: note = Description of Artificial Sequence: Synthetic polynucleotide
  source 1..1461: mol_type = other DNA
atggccctccctgtcaccgccctgctgcttccgctggctcttctgctccacgccgctcggccccaagtgcagcttcaggaaagcggaccgggcctggtcaagccatccgaaactctctccctgacttgcactgtgtctggcggttccatctcatcgtcgtactactactggggctggattaggcagccgcccggaaagggactggagtggatcggaagcatctactattccggctcggcgtactacaaccctagcctcaagtcgagagtgaccatctccgtggatacctccaagaaccagttttccctgcgcctgagctccgtgaccgccgctgacaccgccgtgtactactgtgctcggcattggcaggaatggcccgatgccttcgacatttggggccagggcactatggtcactgtgtcatccgggggtggaggcagcgggggaggagggtccggggggggaggttcagagacaaccttgacccagtcacccgcattcatgtccgccactccgggagacaaggtcatcatctcgtgcaaagcgtcccaggatatcgacgatgccatgaattggtaccagcagaagcctggcgaagcgccgctgttcattatccaatccgcaacctcgcccgtgcctggaatcccaccgcggttcagcggcagcggtttcggaaccgacttttccctgaccattaacaacattgagtccgaggacgccgcctactacttctgcctgcaacacgacaacttccctctcacgttcggccagggaaccaagctggaaatcaagaccactaccccagcaccgaggccacccaccccggctcctaccatcgcctcccagcctctgtccctgcgtccggaggcatgtagacccgcagctggtggggccgtgcatacccggggtcttgacttcgcctgcgatatctacatttgggcccctctggctggtacttgcggggtcctgctgctttcactcgtgatcactctttactgtaagcgcggtcggaagaagctgctgtacatctttaagcaacccttcatgaggcctgtgcagactactcaagaggaggacggctgttcatgccggttcccagaggaggaggaaggcggctgcgaactgcgcgtgaaattcagccgcagcgcagatgctccagcctacaagcaggggcagaaccagctctacaacgaactcaatcttggtcggagagaggagtacgacgtgctggacaagcggagaggacgggacccagaaatgggcgggaagccgcgcagaaagaatccccaagagggcctgtacaacgagctccaaaaggataagatggcagaagcctatagcgagattggtatgaaaggggaacgcagaagaggcaaaggccacgacggactgtaccagggactcagcaccgccaccaaggacacctatgacgctcttcacatgcaggccctgccgcctcgg

SEQ ID NO: 8602 - DNA, 1467 bp, synthetic construct
  misc_feature 1..1467: note = Description of Artificial Sequence: Synthetic polynucleotide
  source 1..1467: mol_type = other DNA
atggccctccctgtcaccgccctgctgcttccgctggctcttctgctccacgccgctcggccccaagtcaatctgcgcgaatccggccccgccttggtcaagcctacccagaccctcactctgacctgtactttctccggcttctccctgcggacttccgggatgtgcgtgtcctggatcagacagcctccgggaaaggccctggagtggctcgctcgcattgactgggatgaggacaagttctactccacctcactcaagaccaggctgaccatcagcaaagatacctctgacaaccaagtggtgctccgcatgaccaacatggacccagccgacactgccacttactactgcgcgaggagcggagcgggcggaacctccgccaccgccttcgatatttggggcccgggtaccatggtcaccgtgtcaagcggaggaggggggtccgggggcggcggttccgggggaggcggatcggacattcagatgactcagtcaccatcgtccctgagcgctagcgtgggcgacagagtgacaatcacttgccgggcatcccaggacatctataacaaccttgcgtggttccagctgaagcctggttccgcaccgcggtcacttatgtacgccgccaacaagagccagtcgggagtgccgtcccggttttccggttcggcctcgggaactgacttcaccctgacgatctccagcctgcaacccgaggatttcgccacctactactgccagcactactaccgctttccctactcgttcggacagggaaccaagctggaaatcaagaccactaccccagcaccgaggccacccaccccggctcctaccatcgcctcccagcctctgtccctgcgtccggaggcatgtagacccgcagctggtggggccgtgcatacccggggtcttgacttcgcctgcgatatctacatttgggcccctctggctggtacttgcggggtcctgctgctttcactcgtgatcactctttactgtaagcgcggtcggaagaagctgctgtacatctttaagcaacccttcatgaggcctgtgcagactactcaagaggaggacggctgttcatgccggttcccagaggaggaggaaggcggctgcgaactgcgcgtgaaattcagccgcagcgcagatgctccagcctacaagcaggggcagaaccagctctacaacgaactcaatcttggtcggagagaggagtacgacgtgctggacaagcggagaggacgggacccagaaatgggcgggaagccgcgcagaaagaatccccaagagggcctgtacaacgagctccaaaaggataagatggcagaagcctatagcgagattggtatgaaaggggaacgcagaagaggcaaaggccacgacggactgtaccagggactcagcaccgccaccaaggacacctatgacgctcttcacatgcaggccctgccgcctcgg

SEQ ID NO: 8603 - DNA, 1470 bp, synthetic construct
  misc_feature 1..1470: note = Description of Artificial Sequence: Synthetic polynucleotide
  source 1..1470: mol_type = other DNA
atggccctccctgtcaccgccctgctgcttccgctggctcttctgctccacgccgctcggcccgaagtgcagcttgtcgaatccggggggggactggtcaagccgggcggatcactgagactgtcctgcgccgcgagcggcttcacgttctcctcctactccatgaactgggtccgccaagcccccgggaagggactggaatgggtgtcctctatctcctcgtcgtcgtcctacatctactacgccgactccgtgaagggaagattcaccatttcccgcgacaacgcaaagaactcactgtacttgcaaatgaactcactccgggccgaagatactgctgtgtactattgcgccaagactattgccgccgtctacgctttcgacatctggggccagggaaccaccgtgactgtgtcgtccggtggtggtggctcgggcggaggaggaagcggcggcggggggtccgagattgtgctgacccagtcgccactgagcctccctgtgacccccgaggaacccgccagcatcagctgccggtccagccagtccctgctccactccaacggatacaattacctcgattggtaccttcagaagcctggacaaagcccgcagctgctcatctacttgggatcaaaccgcgcgtcaggagtgcctgaccggttctccggctcgggcagcggtaccgatttcaccctgaaaatctccagggtggaggcagaggacgtgggagtgtattactgtatgcaggcgctgcagactccgtacacatttgggcagggcaccaagctggagatcaagaccactaccccagcaccgaggccacccaccccggctcctaccatcgcctcccagcctctgtccctgcgtccggaggcatgtagacccgcagctggtggggccgtgcatacccggggtcttgacttcgcctgcgatatctacatttgggcccctctggctggtacttgcggggtcctgctgctttcactcgtgatcactctttactgtaagcgcggtcggaagaagctgctgtacatctttaagcaacccttcatgaggcctgtgcagactactcaagaggaggacggctgttcatgccggttcccagaggaggaggaaggcggctgcgaactgcgcgtgaaattcagccgcagcgcagatgctccagcctacaagcaggggcagaaccagctctacaacgaactcaatcttggtcggagagaggagtacgacgtgctggacaagcggagaggacgggacccagaaatgggcgggaagccgcgcagaaagaatccccaagagggcctgtacaacgagctccaaaaggataagatggcagaagcctatagcgagattggtatgaaaggggaacgcagaagaggcaaaggccacgacggactgtaccagggactcagcaccgccaccaaggacacctatgacgctcttcacatgcaggccctgccgcctcgg

SEQ ID NO: 8604 - DNA, 1452 bp, synthetic construct
  misc_feature 1..1452: note = Description of Artificial Sequence: Synthetic polynucleotide
  source 1..1452: mol_type = other DNA
atggccctccctgtcaccgccctgctgcttccgctggctcttctgctccacgccgctcggcccgaagtccagctcgtggagtccggcggaggccttgtgaagcctggaggttcgctgagactgtcctgcgccgcctccggcttcaccttctccgactactacatgtcctggatcagacaggccccgggaaagggcctggaatgggtgtcctacatctcgtcatcgggcagcactatctactacgcggactcagtgaaggggcggttcaccatttcccgggataacgcgaagaactcgctgtatctgcaaatgaactcactgagggccgaggacaccgccgtgtactactgcgcccgcgatctccgcggggcatttgacatctggggacagggaaccatggtcacagtgtccagcggagggggaggatcgggtggcggaggttccgggggtggaggctcctcctacgtgctgactcagagcccaagcgtcagcgctgcgcccggttacacggcaaccatctcctgtggcggaaacaacattgggaccaagtctgtgcactggtatcagcagaagccgggccaagctcccctgttggtgatccgcgatgactccgtgcggcctagcaaaattccgggacggttctccggctccaacagcggcaatatggccactctcaccatctcgggagtgcaggccggagatgaagccgacttctactgccaagtctgggactcagactccgagcatgtggtgttcgggggcggaaccaagctgactgtgctcaccactaccccagcaccgaggccacccaccccggctcctaccatcgcctcccagcctctgtccctgcgtccggaggcatgtagacccgcagctggtggggccgtgcatacccggggtcttgacttcgcctgcgatatctacatttgggcccctctggctggtacttgcggggtcctgctgctttcactcgtgatcactctttactgtaagcgcggtcggaagaagctgctgtacatctttaagcaacccttcatgaggcctgtgcagactactcaagaggaggacggctgttcatgccggttcccagaggaggaggaaggcggctgcgaactgcgcgtgaaattcagccgcagcgcagatgctccagcctacaagcaggggcagaaccagctctacaacgaactcaatcttggtcggagagaggagtacgacgtgctggacaagcggagaggacgggacccagaaatgggcgggaagccgcgcagaaagaatccccaagagggcctgtacaacgagctccaaaaggataagatggcagaagcctatagcgagattggtatgaaaggggaacgcagaagaggcaaaggccacgacggactgtaccagggactcagcaccgccaccaaggacacctatgacgctcttcacatgcaggccctgccgcctcgg

SEQ ID NO: 8605 - DNA, 1455 bp, synthetic construct
  misc_feature 1..1455: note = Description of Artificial Sequence: Synthetic polynucleotide
  source 1..1455: mol_type = other DNA
atggccctccctgtcaccgccctgctgcttccgctggctcttctgctccacgccgctcggccccaagtgcagctggtgcagagcggggccgaagtcaagaagccgggagcctccgtgaaagtgtcctgcaagccttcgggatacaccgtgacctcccactacattcattgggtccgccgcgcccccggccaaggactcgagtggatgggcatgatcaaccctagcggcggagtgaccgcgtacagccagacgctgcagggacgcgtgactatgacctcggatacctcctcctccaccgtctatatggaactgtccagcctgcggtccgaggataccgccatgtactactgcgcccgggaaggatcaggctccgggtggtatttcgacttctggggaagaggcaccctcgtgactgtgtcatctgggggagggggttccggtggtggcggatcgggaggaggcggttcatcctacgtgctgacccagccaccctccgtgtccgtgagccccggccagactgcatcgattacatgtagcggcgacggcctctccaagaaatacgtgtcgtggtaccagcagaaggccggacagagcccggtggtgctgatctcaagagataaggagcggcctagcggaatcccggacaggttctcgggttccaactccgcggacactgctactctgaccatctcggggacccaggctatggacgaagccgattactactgccaagcctgggacgacactactgtcgtgtttggagggggcaccaagttgaccgtccttaccactaccccagcaccgaggccacccaccccggctcctaccatcgcctcccagcctctgtccctgcgtccggaggcatgtagacccgcagctggtggggccgtgcatacccggggtcttgacttcgcctgcgatatctacatttgggcccctctggctggtacttgcggggtcctgctgctttcactcgtgatcactctttactgtaagcgcggtcggaagaagctgctgtacatctttaagcaacccttcatgaggcctgtgcagactactcaagaggaggacggctgttcatgccggttcccagaggaggaggaaggcggctgcgaactgcgcgtgaaattcagccgcagcgcagatgctccagcctacaagcaggggcagaaccagctctacaacgaactcaatcttggtcggagagaggagtacgacgtgctggacaagcggagaggacgggacccagaaatgggcgggaagccgcgcagaaagaatccccaagagggcctgtacaacgagctccaaaaggataagatggcagaagcctatagcgagattggtatgaaaggggaacgcagaagaggcaaaggccacgacggactgtaccagggactcagcaccgccaccaaggacacctatgacgctcttcacatgcaggccctgccgcctcgg

SEQ ID NO: 8606 - DNA, 1467 bp, synthetic construct
  misc_feature 1..1467: note = Description of Artificial Sequence: Synthetic polynucleotide
  source 1..1467: mol_type = other DNA
atggccctccctgtcaccgccctgctgcttccgctggctcttctgctccacgccgctcggccccaagtgcagcttcaggagagcggcccgggactcgtgaagccgtcccagaccctgtccctgacttgcaccgtgtcgggaggaagcatctcgagcggaggctactattggtcgtggattcggcagcaccctggaaagggcctggaatggatcggctacatctactactccggctcgacctactacaacccatcgctgaagtccagagtgacaatctcagtggacacgtccaagaatcagttcagcctgaagctctcttccgtgactgcggccgacaccgccgtgtactactgcgcacgcgctggaattgccgcccggctgaggggtgccttcgacatttggggacagggcaccatggtcaccgtgtcctccggcggcggaggttccgggggtggaggctcaggaggaggggggtccgacatcgtcatgactcagtcgccctcaagcgtcagcgcgtccgtcggggacagagtgatcatcacctgtcgggcgtcccagggaattcgcaactggctggcctggtatcagcagaagcccggaaaggcccccaacctgttgatctacgccgcctcaaacctccaatccggggtgccgagccgcttcagcggctccggttcgggtgccgatttcactctgaccatctcctccctgcaacctgaagatgtggctacctactactgccaaaagtacaactccgcaccttttactttcggaccggggaccaaagtggacattaagaccactaccccagcaccgaggccacccaccccggctcctaccatcgcctcccagcctctgtccctgcgtccggaggcatgtagacccgcagctggtggggccgtgcatacccggggtcttgacttcgcctgcgatatctacatttgggcccctctggctggtacttgcggggtcctgctgctttcactcgtgatcactctttactgtaagcgcggtcggaagaagctgctgtacatctttaagcaacccttcatgaggcctgtgcagactactcaagaggaggacggctgttcatgccggttcccagaggaggaggaaggcggctgcgaactgcgcgtgaaattcagccgcagcgcagatgctccagcctacaagcaggggcagaaccagctctacaacgaactcaatcttggtcggagagaggagtacgacgtgctggacaagcggagaggacgggacccagaaatgggcgggaagccgcgcagaaagaatccccaagagggcctgtacaacgagctccaaaaggataagatggcagaagcctatagcgagattggtatgaaaggggaacgcagaagaggcaaaggccacgacggactgtaccagggactcagcaccgccaccaaggacacctatgacgctcttcacatgcaggccctgccgcctcgg

SEQ ID NO: 8607 - DNA, 1491 bp, synthetic construct
  misc_feature 1..1491: note = Description of Artificial Sequence: Synthetic polynucleotide
  source 1..1491: mol_type = other DNA
atggccctccctgtcaccgccctgctgcttccgctggctcttctgctccacgccgctcggccccaagtgcagctggtccagtcgggcgccgaggtcaagaagcccgggagctctgtgaaagtgtcctgcaaggcctccgggggcacctttagctcctacgccatctcctgggtccgccaagcaccgggtcaaggcctggagtggatggggggaattatccctatcttcggcactgccaactacgcccagaagttccagggacgcgtgaccattaccgcggacgaatccacctccaccgcttatatggagctgtccagcttgcgctcggaagataccgccgtgtactactgcgcccggaggggtggataccagctgctgagatgggacgtgggcctcctgcggtcggcgttcgacatctggggccagggcactatggtcactgtgtccagcggaggaggcggatcgggaggcggcggatcagggggaggcggttccagctacgtgcttactcaacccccttcggtgtccgtggccccgggacagaccgccagaatcacttgcggaggaaacaacattgggtccaagagcgtgcattggtaccagcagaagccaggacaggcccctgtgctggtgctctacgggaagaacaatcggcccagcggagtgccggacaggttctcgggttcacgctccggtacaaccgcttcactgactatcaccggggcccaggcagaggatgaagcggactactactgttcctcccgggattcatccggcgaccacctccgggtgttcggaaccggaacgaaggtcaccgtgctgaccactaccccagcaccgaggccacccaccccggctcctaccatcgcctcccagcctctgtccctgcgtccggaggcatgtagacccgcagctggtggggccgtgcatacccggggtcttgacttcgcctgcgatatctacatttgggcccctctggctggtacttgcggggtcctgctgctttcactcgtgatcactctttactgtaagcgcggtcggaagaagctgctgtacatctttaagcaacccttcatgaggcctgtgcagactactcaagaggaggacggctgttcatgccggttcccagaggaggaggaaggcggctgcgaactgcgcgtgaaattcagccgcagcgcagatgctccagcctacaagcaggggcagaaccagctctacaacgaactcaatcttggtcggagagaggagtacgacgtgctggacaagcggagaggacgggacccagaaatgggcgggaagccgcgcagaaagaatccccaagagggcctgtacaacgagctccaaaaggataagatggcagaagcctatagcgagattggtatgaaaggggaacgcagaagaggcaaaggccacgacggactgtaccagggactcagcaccgccaccaaggacacctatgacgctcttcacatgcaggccctgccgcctcgg

SEQ ID NO: 8608 - DNA, 1476 bp, synthetic construct
  misc_feature 1..1476: note = Description of Artificial Sequence: Synthetic polynucleotide
  source 1..1476: mol_type = other DNA
atggccctccctgtcaccgccctgctgcttccgctggctcttctgctccacgccgctcggcccgaagtgcagctccaacagtcaggaccggggctcgtgaagccatcccagaccctgtccctgacttgtgccatctcgggagatagcgtgtcatcgaactccgccgcctggaactggattcggcagagcccgtcccgcggactggagtggcttggaaggacctactaccggtccaagtggtactctttctacgcgatctcgctgaagtcccgcattatcattaaccctgatacctccaagaatcagttctccctccaactgaaatccgtcacccccgaggacacagcagtgtattactgcgcacggagcagccccgaaggactgttcctgtattggtttgacccctggggccaggggactcttgtgaccgtgtcgagcggcggagatgggtccggtggcggtggttcggggggcggcggatcatcatccgaactgacccaggacccggctgtgtccgtggcgctgggacaaaccatccgcattacgtgccagggagactccctgggcaactactacgccacttggtaccagcagaagccgggccaagcccctgtgttggtcatctacgggaccaacaacagaccttccggcatccccgaccggttcagcgcttcgtcctccggcaacactgccagcctgaccatcactggagcgcaggccgaagatgaggccgactactactgcaacagcagagactcctcgggtcatcacctcttgttcggaactggaaccaaggtcaccgtgctgaccactaccccagcaccgaggccacccaccccggctcctaccatcgcctcccagcctctgtccctgcgtccggaggcatgtagacccgcagctggtggggccgtgcatacccggggtcttgacttcgcctgcgatatctacatttgggcccctctggctggtacttgcggggtcctgctgctttcactcgtgatcactctttactgtaagcgcggtcggaagaagctgctgtacatctttaagcaacccttcatgaggcctgtgcagactactcaagaggaggacggctgttcatgccggttcccagaggaggaggaaggcggctgcgaactgcgcgtgaaattcagccgcagcgcagatgctccagcctacaagcaggggcagaaccagctctacaacgaactcaatcttggtcggagagaggagtacgacgtgctggacaagcggagaggacgggacccagaaatgggcgggaagccgcgcagaaagaatccccaagagggcctgtacaacgagctccaaaaggataagatggcagaagcctatagcgagattggtatgaaaggggaacgcagaagaggcaaaggccacgacggactgtaccagggactcagcaccgccaccaaggacacctatgacgctcttcacatgcaggccctgccgcctcgg

SEQ ID NO: 8609 - DNA, 1470 bp, synthetic construct
  misc_feature 1..1470: note = Description of Artificial Sequence: Synthetic polynucleotide
  source 1..1470: mol_type = other DNA
atggccctccctgtcaccgccctgctgcttccgctggctcttctgctccacgccgctcggcccgaagtgcagctcgtggagtcaggaggcggcctggtccagccgggagggtcccttagactgtcatgcgccgcaagcggattcactttctcctcctatgccatgagctgggtccgccaagcccccggaaagggactggaatgggtgtccgccatctcggggtctggaggctcaacttactacgctgactccgtgaagggacggttcaccattagccgcgacaactccaagaacaccctctacctccaaatgaactccctgcgggccgaggataccgccgtctactactgcgccaaagtggaaggttcaggatcgctggactactggggacagggtactctcgtgaccgtgtcatcgggcggaggaggttccggcggtggcggctccggcggcggagggtcggagatcgtgatgacccagagccctggtactctgagcctttcgccgggagaaagggccaccctgtcctgccgcgcttcccaatccgtgtcctccgcgtacttggcgtggtaccagcagaagccgggacagccccctcggctgctgatcagcggggccagcacccgggcaaccggaatcccagacagattcgggggttccggcagcggcacagatttcaccctgactatttcgaggttggagcccgaggactttgcggtgtattactgtcagcactacgggtcgtcctttaatggctccagcctgttcacgttcggacaggggacccgcctggaaatcaagaccactaccccagcaccgaggccacccaccccggctcctaccatcgcctcccagcctctgtccctgcgtccggaggcatgtagacccgcagctggtggggccgtgcatacccggggtcttgacttcgcctgcgatatctacatttgggcccctctggctggtacttgcggggtcctgctgctttcactcgtgatcactctttactgtaagcgcggtcggaagaagctgctgtacatctttaagcaacccttcatgaggcctgtgcagactactcaagaggaggacggctgttcatgccggttcccagaggaggaggaaggcggctgcgaactgcgcgtgaaattcagccgcagcgcagatgctccagcctacaagcaggggcagaaccagctctacaacgaactcaatcttggtcggagagaggagtacgacgtgctggacaagcggagaggacgggacccagaaatgggcgggaagccgcgcagaaagaatccccaagagggcctgtacaacgagctccaaaaggataagatggcagaagcctatagcgagattggtatgaaaggggaacgcagaagaggcaaaggccacgacggactgtaccagggactcagcaccgccaccaaggacacctatgacgctcttcacatgcaggccctgccgcctcgg

SEQ ID NO: 8610 - DNA, 1455 bp, synthetic construct
  misc_feature 1..1455: note = Description of Artificial Sequence: Synthetic polynucleotide
  source 1..1455: mol_type = other DNA
atggccctccctgtcaccgccctgctgcttccgctggctcttctgctccacgccgctcggcccgaagtgcaactggtggaaaccggtggcggcctggtgcagcctggaggatcattgaggctgtcatgcgcggccagcggtattaccttctcccggtaccccatgtcctgggtcagacaggccccggggaaagggcttgaatgggtgtccgggatctcggactccggtgtcagcacttactacgccgactccgccaagggacgcttcaccatttcccgggacaactcgaagaacaccctgttcctccaaatgagctccctccgggacgaggatactgcagtgtactactgcgtgacccgcgccgggtccgaggcgtctgacatttggggacagggcactatggtcaccgtgtcgtccggcggagggggctcgggaggcggtggcagcggaggaggagggtccgagatcgtgctgacccaatccccggccaccctctcgctgagccctggagaaagggcaaccttgtcctgtcgcgcgagccagtccgtgagcaactccctggcctggtaccagcagaagcccggacaggctccgagacttctgatctacgacgcttcgagccgggccactggaatccccgaccgcttttcggggtccggctcaggaaccgatttcaccctgacaatctcacggctggagccagaggatttcgccatctattactgccagcagttcggtacttcctccggcctgactttcggaggcggcacgaagctcgaaatcaagaccactaccccagcaccgaggccacccaccccggctcctaccatcgcctcccagcctctgtccctgcgtccggaggcatgtagacccgcagctggtggggccgtgcatacccggggtcttgacttcgcctgcgatatctacatttgggcccctctggctggtacttgcggggtcctgctgctttcactcgtgatcactctttactgtaagcgcggtcggaagaagctgctgtacatctttaagcaacccttcatgaggcctgtgcagactactcaagaggaggacggctgttcatgccggttcccagaggaggaggaaggcggctgcgaactgcgcgtgaaattcagccgcagcgcagatgctccagcctacaagcaggggcagaaccagctctacaacgaactcaatcttggtcggagagaggagtacgacgtgctggacaagcggagaggacgggacccagaaatgggcgggaagccgcgcagaaagaatccccaagagggcctgtacaacgagctccaaaaggataagatggcagaagcctatagcgagattggtatgaaaggggaacgcagaagaggcaaaggccacgacggactgtaccagggactcagcaccgccaccaaggacacctatgacgctcttcacatgcaggccctgccgcctcgg

SEQ ID NO: 8611 - DNA, 1476 bp, synthetic construct
  misc_feature 1..1476: note = Description of Artificial Sequence: Synthetic polynucleotide
  source 1..1476: mol_type = other DNA
atggccctccctgtcaccgccctgctgcttccgctggctcttctgctccacgccgctcggccccaagtgcagctcgtggaatcgggtggcggactggtgcagccggggggctcacttagactgtcctgcgcggccagcggattcactttctcctcctacgccatgtcctgggtcagacaggcccctggaaagggcctggaatgggtgtccgcaatcagcggcagcggcggctcgacctattacgcggattcagtgaagggcagattcaccatttcccgggacaacgccaagaactccttgtaccttcaaatgaactccctccgcgcggaagataccgcaatctactactgcgctcgggccacttacaagagggaactgcgctactactacgggatggacgtctggggccagggaaccatggtcaccgtgtccagcggaggaggaggatcgggaggaggcggtagcgggggtggagggtcggagatcgtgatgacccagtcccccggcactgtgtcgctgtcccccggcgaacgggccaccctgtcatgtcgggccagccagtcagtgtcgtcaagcttcctcgcctggtaccagcagaaaccgggacaagctccccgcctgctgatctacggagccagcagccgggccaccggtattcctgaccggttctccggttcggggtccgggaccgactttactctgactatctctcgcctcgagccagaggactccgccgtgtattactgccagcagtaccactcctccccgtcctggacgttcggacagggcacaaggctggagattaagaccactaccccagcaccgaggccacccaccccggctcctaccatcgcctcccagcctctgtccctgcgtccggaggcatgtagacccgcagctggtggggccgtgcatacccggggtcttgacttcgcctgcgatatctacatttgggcccctctggctggtacttgcggggtcctgctgctttcactcgtgatcactctttactgtaagcgcggtcggaagaagctgctgtacatctttaagcaacccttcatgaggcctgtgcagactactcaagaggaggacggctgttcatgccggttcccagaggaggaggaaggcggctgcgaactgcgcgtgaaattcagccgcagcgcagatgctccagcctacaagcaggggcagaaccagctctacaacgaactcaatcttggtcggagagaggagtacgacgtgctggacaagcggagaggacgggacccagaaatgggcgggaagccgcgcagaaagaatccccaagagggcctgtacaacgagctccaaaaggataagatggcagaagcctatagcgagattggtatgaaaggggaacgcagaagaggcaaaggccacgacggactgtaccagggactcagcaccgccaccaaggacacctatgacgctcttcacatgcaggccctgccgcctcgg

SEQ ID NO: 8612 - DNA, 1476 bp, synthetic construct
  misc_feature 1..1476: note = Description of Artificial Sequence: Synthetic polynucleotide
  source 1..1476: mol_type = other DNA
atggccctccctgtcaccgccctgctgcttccgctggctcttctgctccacgccgctcggcccgaggtgcagcttgtggaaaccggtggcggactggtgcagcccggaggaagcctcaggctgtcctgcgccgcgtccggcttcaccttctcctcgtacgccatgtcctgggtccgccaggcccccggaaagggcctggaatgggtgtccgccatctctggaagcggaggttccacgtactacgcggacagcgtcaagggaaggttcacaatctcccgcgataattcgaagaacactctgtaccttcaaatgaacaccctgaaggccgaggacactgctgtgtactactgcgcacgggccacctacaagagagagctccggtactactacggaatggacgtctggggccagggaactactgtgaccgtgtcctcgggagggggtggctccggggggggcggctccggcggaggcggttccgagattgtgctgacccagtcaccttcaactctgtcgctgtccccgggagagagcgctactctgagctgccgggccagccagtccgtgtccaccaccttcctcgcctggtatcagcagaagccggggcaggcaccacggctcttgatctacgggtcaagcaacagagcgaccggaattcctgaccgcttctcggggagcggttcaggcaccgacttcaccctgactatccggcgcctggaacccgaagatttcgccgtgtattactgtcaacagtaccactcctcgccgtcctggacctttggccaaggaaccaaagtggaaatcaagaccactaccccagcaccgaggccacccaccccggctcctaccatcgcctcccagcctctgtccctgcgtccggaggcatgtagacccgcagctggtggggccgtgcatacccggggtcttgacttcgcctgcgatatctacatttgggcccctctggctggtacttgcggggtcctgctgctttcactcgtgatcactctttactgtaagcgcggtcggaagaagctgctgtacatctttaagcaacccttcatgaggcctgtgcagactactcaagaggaggacggctgttcatgccggttcccagaggaggaggaaggcggctgcgaactgcgcgtgaaattcagccgcagcgcagatgctccagcctacaagcaggggcagaaccagctctacaacgaactcaatcttggtcggagagaggagtacgacgtgctggacaagcggagaggacgggacccagaaatgggcgggaagccgcgcagaaagaatccccaagagggcctgtacaacgagctccaaaaggataagatggcagaagcctatagcgagattggtatgaaaggggaacgcagaagaggcaaaggccacgacggactgtaccagggactcagcaccgccaccaaggacacctatgacgctcttcacatgcaggccctgccgcctcgg

SEQ ID NO: 8613 - DNA, 1449 bp, synthetic construct
  misc_feature 1..1449: note = Description of Artificial Sequence: Synthetic polynucleotide
  source 1..1449: mol_type = other DNA
atggccctccctgtcaccgccctgctgcttccgctggctcttctgctccacgccgctcggcccgaagtgcagctcgtggaaactggaggtggactcgtgcagcctggacggtcgctgcggctgagctgcgctgcatccggcttcaccttcgacgattatgccatgcactgggtcagacaggcgccagggaagggacttgagtgggtgtccggtatcagctggaatagcggctcaatcggatacgcggactccgtgaagggaaggttcaccatttcccgcgacaacgccaagaactccctgtacttgcaaatgaacagcctccgggatgaggacactgccgtgtactactgcgcccgcgtcggaaaagctgtgcccgacgtctggggccagggaaccactgtgaccgtgtccagcggcgggggtggatcgggcggtggagggtccggtggagggggctcagatattgtgatgacccagaccccctcgtccctgtccgcctcggtcggcgaccgcgtgactatcacatgtagagcctcgcagagcatctccagctacctgaactggtatcagcagaagccggggaaggccccgaagctcctgatctacgcggcatcatcactgcaatcgggagtgccgagccggttttccgggtccggctccggcaccgacttcacgctgaccatttcttccctgcaacccgaggacttcgccacttactactgccagcagtcctactccaccccttactccttcggccaaggaaccaggctggaaatcaagaccactaccccagcaccgaggccacccaccccggctcctaccatcgcctcccagcctctgtccctgcgtccggaggcatgtagacccgcagctggtggggccgtgcatacccggggtcttgacttcgcctgcgatatctacatttgggcccctctggctggtacttgcggggtcctgctgctttcactcgtgatcactctttactgtaagcgcggtcggaagaagctgctgtacatctttaagcaacccttcatgaggcctgtgcagactactcaagaggaggacggctgttcatgccggttcccagaggaggaggaaggcggctgcgaactgcgcgtgaaattcagccgcagcgcagatgctccagcctacaagcaggggcagaaccagctctacaacgaactcaatcttggtcggagagaggagtacgacgtgctggacaagcggagaggacgggacccagaaatgggcgggaagccgcgcagaaagaatccccaagagggcctgtacaacgagctccaaaaggataagatggcagaagcctatagcgagattggtatgaaaggggaacgcagaagaggcaaaggccacgacggactgtaccagggactcagcaccgccaccaaggacacctatgacgctcttcacatgcaggccctgccgcctcgg

SEQ ID NO: 8614 - DNA, 1470 bp, synthetic construct
  misc_feature 1..1470: note = Description of Artificial Sequence: Synthetic polynucleotide
  source 1..1470: mol_type = other DNA
atggccctccctgtcaccgccctgctgcttccgctggctcttctgctccacgccgctcggcccgaagtgcagctcgtggagagcgggggaggattggtgcagcccggaaggtccctgcggctctcctgcactgcgtctggcttcaccttcgacgactacgcgatgcactgggtcagacagcgcccgggaaagggcctggaatgggtcgcctcaatcaactggaagggaaactccctggcctatggcgacagcgtgaagggccgcttcgccatttcgcgcgacaacgccaagaacaccgtgtttctgcaaatgaattccctgcggaccgaggataccgctgtgtactactgcgccagccaccagggcgtggcatactataactacgccatggacgtgtggggaagagggacgctcgtcaccgtgtcctccgggggcggtggatcgggtggaggaggaagcggtggcgggggcagcgaaatcgtgctgactcagagcccgggaactctttcactgtccccgggagaacgggccactctctcgtgccgggccacccagtccatcggctcctccttccttgcctggtaccagcagaggccaggacaggcgccccgcctgctgatctacggtgcttcccaacgcgccactggcattcctgaccggttcagcggcagagggtcgggaaccgatttcacactgaccatttcccgggtggagcccgaagattcggcagtctactactgtcagcattacgagtcctccccttcatggaccttcggtcaagggaccaaagtggagatcaagaccactaccccagcaccgaggccacccaccccggctcctaccatcgcctcccagcctctgtccctgcgtccggaggcatgtagacccgcagctggtggggccgtgcatacccggggtcttgacttcgcctgcgatatctacatttgggcccctctggctggtacttgcggggtcctgctgctttcactcgtgatcactctttactgtaagcgcggtcggaagaagctgctgtacatctttaagcaacccttcatgaggcctgtgcagactactcaagaggaggacggctgttcatgccggttcccagaggaggaggaaggcggctgcgaactgcgcgtgaaattcagccgcagcgcagatgctccagcctacaagcaggggcagaaccagctctacaacgaactcaatcttggtcggagagaggagtacgacgtgctggacaagcggagaggacgggacccagaaatgggcgggaagccgcgcagaaagaatccccaagagggcctgtacaacgagctccaaaaggataagatggcagaagcctatagcgagattggtatgaaaggggaacgcagaagaggcaaaggccacgacggactgtaccagggactcagcaccgccaccaaggacacctatgacgctcttcacatgcaggccctgccgcctcgg

SEQ ID NO: 8615 - DNA, 1455 bp, synthetic construct
  misc_feature 1..1455: note = Description of Artificial Sequence: Synthetic polynucleotide
  source 1..1455: mol_type = other DNA
atggccctccctgtcaccgccctgctgcttccgctggctcttctgctccacgccgctcggcccgaggtgcagttggtcgaaagcgggggcgggcttgtgcagcctggcggatcactgcggctgtcctgcgcggcatcaggcttcacgttttcttcctacgccatgtcctgggtgcgccaggcccctggaaagggactggaatgggtgtccgcgatttcggggtccggcgggagcacctactacgccgattccgtgaagggccgcttcactatctcgcgggacaactccaagaacaccctctacctccaaatgaatagcctgcgggccgaggataccgccgtctactattgcgctaaggtcgtgcgcgacggaatggacgtgtggggacagggtaccaccgtgacagtgtcctcggggggaggcggtagcggcggaggaggaagcggtggtggaggttccgagattgtgctgactcaatcacccgcgaccctgagcctgtcccccggcgaaagggccactctgtcctgtcgggccagccaatcagtctcctcctcgtacctggcctggtaccagcagaagccaggacaggctccgagactccttatctatggcgcatcctcccgcgccaccggaatcccggataggttctcgggaaacggatcggggaccgacttcactctcaccatctcccggctggaaccggaggacttcgccgtgtactactgccagcagtacggcagcccgcctagattcactttcggccccggcaccaaagtggacatcaagaccactaccccagcaccgaggccacccaccccggctcctaccatcgcctcccagcctctgtccctgcgtccggaggcatgtagacccgcagctggtggggccgtgcatacccggggtcttgacttcgcctgcgatatctacatttgggcccctctggctggtacttgcggggtcctgctgctttcactcgtgatcactctttactgtaagcgcggtcggaagaagctgctgtacatctttaagcaacccttcatgaggcctgtgcagactactcaagaggaggacggctgttcatgccggttcccagaggaggaggaaggcggctgcgaactgcgcgtgaaattcagccgcagcgcagatgctccagcctacaagcaggggcagaaccagctctacaacgaactcaatcttggtcggagagaggagtacgacgtgctggacaagcggagaggacgggacccagaaatgggcgggaagccgcgcagaaagaatccccaagagggcctgtacaacgagctccaaaaggataagatggcagaagcctatagcgagattggtatgaaaggggaacgcagaagaggcaaaggccacgacggactgtaccagggactcagcaccgccaccaaggacacctatgacgctcttcacatgcaggccctgccgcctcgg

SEQ ID NO: 8616 - DNA, 1458 bp, synthetic construct
  misc_feature 1..1458: note = Description of Artificial Sequence: Synthetic polynucleotide
  source 1..1458: mol_type = other DNA
atggccctccctgtcaccgccctgctgcttccgctggctcttctgctccacgccgctcggcccgaagtgcagctgctggagtccggcggtggattggtgcaaccggggggatcgctcagactgtcctgtgcggcgtcaggcttcaccttctcgagctacgccatgtcatgggtcagacaggcccctggaaagggtctggaatgggtgtccgccatttccgggagcgggggatctacatactacgccgatagcgtgaagggccgcttcaccatttcccgggacaactccaagaacactctctatctgcaaatgaactccctccgcgctgaggacactgccgtgtactactgcgccaaaatccctcagaccggcaccttcgactactggggacaggggactctggtcaccgtcagcagcggtggcggaggttcggggggaggaggaagcggcggcggagggtccgagattgtgctgacccagtcacccggcactttgtccctgtcgcctggagaaagggccaccctttcctgccgggcatcccaatccgtgtcctcctcgtacctggcctggtaccagcagaggcccggacaggccccacggcttctgatctacggagcaagcagccgcgcgaccggtatcccggaccggttttcgggctcgggctcaggaactgacttcaccctcaccatctcccgcctggaacccgaagatttcgctgtgtattactgccagcactacggcagctccccgtcctggacgttcggccagggaactcggctggagatcaagaccactaccccagcaccgaggccacccaccccggctcctaccatcgcctcccagcctctgtccctgcgtccggaggcatgtagacccgcagctggtggggccgtgcatacccggggtcttgacttcgcctgcgatatctacatttgggcccctctggctggtacttgcggggtcctgctgctttcactcgtgatcactctttactgtaagcgcggtcggaagaagctgctgtacatctttaagcaacccttcatgaggcctgtgcagactactcaagaggaggacggctgttcatgccggttcccagaggaggaggaaggcggctgcgaactgcgcgtgaaattcagccgcagcgcagatgctccagcctacaagcaggggcagaaccagctctacaacgaactcaatcttggtcggagagaggagtacgacgtgctggacaagcggagaggacgggacccagaaatgggcgggaagccgcgcagaaagaatccccaagagggcctgtacaacgagctccaaaaggataagatggcagaagcctatagcgagattggtatgaaaggggaacgcagaagaggcaaaggccacgacggactgtaccagggactcagcaccgccaccaaggacacctatgacgctcttcacatgcaggccctgccgcctcgg

SEQ ID NO: 8617 - DNA, 1476 bp, synthetic construct
  misc_feature 1..1476: note = Description of Artificial Sequence: Synthetic polynucleotide
  source 1..1476: mol_type = other DNA
atggccctccctgtcaccgccctgctgcttccgctggctcttctgctccacgccgctcggcccgaagtgcaactggtggaaaccggtggaggactcgtgcagcctggcggcagcctccggctgagctgcgccgcttcgggattcaccttttcctcctacgcgatgtcttgggtcagacaggcccccggaaaggggctggaatgggtgtcagccatctccggctccggcggatcaacgtactacgccgactccgtgaaaggccggttcaccatgtcgcgcgagaatgacaagaactccgtgttcctgcaaatgaactccctgagggtggaggacaccggagtgtactattgtgcgcgcgccaactacaagagagagctgcggtactactacggaatggacgtctggggacagggaactatggtgaccgtgtcatccggtggagggggaagcggcggtggaggcagcgggggcgggggttcagaaattgtcatgacccagtccccgggaactctttccctctcccccggggaatccgcgactttgtcctgccgggccagccagcgcgtggcctcgaactacctcgcatggtaccagcataagccaggccaagccccttccctgctgatttccggggctagcagccgcgccactggcgtgccggataggttctcgggaagcggctcgggtaccgatttcaccctggcaatctcgcggctggaaccggaggattcggccgtgtactactgccagcactatgactcatccccctcctggacattcggacagggcaccaaggtcgagatcaagaccactaccccagcaccgaggccacccaccccggctcctaccatcgcctcccagcctctgtccctgcgtccggaggcatgtagacccgcagctggtggggccgtgcatacccggggtcttgacttcgcctgcgatatctacatttgggcccctctggctggtacttgcggggtcctgctgctttcactcgtgatcactctttactgtaagcgcggtcggaagaagctgctgtacatctttaagcaacccttcatgaggcctgtgcagactactcaagaggaggacggctgttcatgccggttcccagaggaggaggaaggcggctgcgaactgcgcgtgaaattcagccgcagcgcagatgctccagcctacaagcaggggcagaaccagctctacaacgaactcaatcttggtcggagagaggagtacgacgtgctggacaagcggagaggacgggacccagaaatgggcgggaagccgcgcagaaagaatccccaagagggcctgtacaacgagctccaaaaggataagatggcagaagcctatagcgagattggtatgaaaggggaacgcagaagaggcaaaggccacgacggactgtaccagggactcagcaccgccaccaaggacacctatgacgctcttcacatgcaggccctgccgcctcgg

SEQ ID NO: 8618 - DNA, 1464 bp, synthetic construct
  misc_feature 1..1464: note = Description of Artificial Sequence: Synthetic polynucleotide
  source 1..1464: mol_type = other DNA
atggccctccctgtcaccgccctgctgcttccgctggctcttctgctccacgccgctcggcccgaagtgcagctgctcgaaaccggtggagggctggtgcagccagggggctccctgaggctttcatgcgccgctagcggattctccttctcctcttacgccatgtcgtgggtccgccaagcccctggaaaaggcctggaatgggtgtccgcgatttccgggagcggaggttcgacctattacgccgactccgtgaagggccgctttaccatctcccgggataactccaagaacactctgtacctccaaatgaactcgctgagagccgaggacaccgccgtgtattactgcgcgaaggcgctggtcggcgcgactggggcattcgacatctggggacagggaactcttgtgaccgtgtcgagcggaggcggcggctccggcggaggagggagcgggggcggtggttccgaaatcgtgttgactcagtccccgggaaccctgagcttgtcacccggggagcgggccactctctcctgtcgcgcctcccaatcgctctcatccaatttcctggcctggtaccagcagaagcccggacaggccccgggcctgctcatctacggcgcttcaaactgggcaacgggaacccctgatcggttcagcggaagcggatcgggtactgactttaccctgaccatcaccagactggaaccggaggacttcgccgtgtactactgccagtactacggcacctcccccatgtacacattcggacagggtaccaaggtcgagattaagaccactaccccagcaccgaggccacccaccccggctcctaccatcgcctcccagcctctgtccctgcgtccggaggcatgtagacccgcagctggtggggccgtgcatacccggggtcttgacttcgcctgcgatatctacatttgggcccctctggctggtacttgcggggtcctgctgctttcactcgtgatcactctttactgtaagcgcggtcggaagaagctgctgtacatctttaagcaacccttcatgaggcctgtgcagactactcaagaggaggacggctgttcatgccggttcccagaggaggaggaaggcggctgcgaactgcgcgtgaaattcagccgcagcgcagatgctccagcctacaagcaggggcagaaccagctctacaacgaactcaatcttggtcggagagaggagtacgacgtgctggacaagcggagaggacgggacccagaaatgggcgggaagccgcgcagaaagaatccccaagagggcctgtacaacgagctccaaaaggataagatggcagaagcctatagcgagattggtatgaaaggggaacgcagaagaggcaaaggccacgacggactgtaccagggactcagcaccgccaccaaggacacctatgacgctcttcacatgcaggccctgccgcctcgg

SEQ ID NO: 8619 - DNA, 1464 bp, synthetic construct
  misc_feature 1..1464: note = Description of Artificial Sequence: Synthetic polynucleotide
  source 1..1464: mol_type = other DNA
atggccctccctgtcaccgccctgctgcttccgctggctcttctgctccacgccgctcggcccgaagtgcagctgcttgagagcggtggaggtctggtgcagcccgggggatcactgcgcctgtcctgtgccgcgtccggtttcactttctcctcgtacgccatgtcgtgggtcagacaggcaccgggaaagggactggaatgggtgtcagccatttcgggttcggggggcagcacctactacgctgactccgtgaagggccggttcaccatttcccgcgacaactccaagaacaccttgtacctccaaatgaactccctgcgggccgaagataccgccgtgtattactgcgtgctgtggttcggagagggattcgacccgtggggacaaggaacactcgtgactgtgtcatccggcggaggcggcagcggtggcggcggttccggcggcggcggatctgacatcgtgttgacccagtcccctctgagcctgccggtcactcctggcgaaccagccagcatctcctgccggtcgagccagtccctcctgcactccaatgggtacaactacctcgattggtatctgcaaaagccgggccagagcccccagctgctgatctaccttgggtcaaaccgcgcttccggggtgcctgatagattctccgggtccgggagcggaaccgactttaccctgaaaatctcgagggtggaggccgaggacgtcggagtgtactactgcatgcaggcgctccagactcccctgaccttcggaggaggaacgaaggtcgacatcaagaccactaccccagcaccgaggccacccaccccggctcctaccatcgcctcccagcctctgtccctgcgtccggaggcatgtagacccgcagctggtggggccgtgcatacccggggtcttgacttcgcctgcgatatctacatttgggcccctctggctggtacttgcggggtcctgctgctttcactcgtgatcactctttactgtaagcgcggtcggaagaagctgctgtacatctttaagcaacccttcatgaggcctgtgcagactactcaagaggaggacggctgttcatgccggttcccagaggaggaggaaggcggctgcgaactgcgcgtgaaattcagccgcagcgcagatgctccagcctacaagcaggggcagaaccagctctacaacgaactcaatcttggtcggagagaggagtacgacgtgctggacaagcggagaggacgggacccagaaatgggcgggaagccgcgcagaaagaatccccaagagggcctgtacaacgagctccaaaaggataagatggcagaagcctatagcgagattggtatgaaaggggaacgcagaagaggcaaaggccacgacggactgtaccagggactcagcaccgccaccaaggacacctatgacgctcttcacatgcaggccctgccgcctcgg

SEQ ID NO: 8620 - DNA, 1485 bp, synthetic construct
  misc_feature 1..1485: note = Description of Artificial Sequence: Synthetic polynucleotide
  source 1..1485: mol_type = other DNA
atggccctccctgtcaccgccctgctgcttccgctggctcttctgctccacgccgctcggccccaagtgcagctcgtggagtcaggcggaggactggtgcagcccgggggctccctgagactttcctgcgcggcatcgggttttaccttctcctcctatgctatgtcctgggtgcgccaggccccgggaaagggactggaatgggtgtccgcaatcagcggtagcgggggctcaacatactacgccgactccgtcaagggtcgcttcactatttcccgggacaactccaagaataccctgtacctccaaatgaacagcctcagggccgaggatactgccgtgtactactgcgccaaagtcggatacgatagctccggttactaccgggactactacggaatggacgtgtggggacagggcaccaccgtgaccgtgtcaagcggcggaggcggttcaggagggggaggctccggcggtggagggtccgaaatcgtcctgactcagtcgcctggcactctgtcgttgtccccgggggagcgcgctaccctgtcgtgtcgggcgtcgcagtccgtgtcgagctcctacctcgcgtggtaccagcagaagcccggacaggcccctagacttctgatctacggcacttcttcacgcgccaccgggatcagcgacaggttcagcggctccggctccgggaccgacttcaccctgaccattagccggctggagcctgaagatttcgccgtgtattactgccaacactacggaaactcgccgccaaagttcacgttcggacccggaaccaagctggaaatcaagaccactaccccagcaccgaggccacccaccccggctcctaccatcgcctcccagcctctgtccctgcgtccggaggcatgtagacccgcagctggtggggccgtgcatacccggggtcttgacttcgcctgcgatatctacatttgggcccctctggctggtacttgcggggtcctgctgctttcactcgtgatcactctttactgtaagcgcggtcggaagaagctgctgtacatctttaagcaacccttcatgaggcctgtgcagactactcaagaggaggacggctgttcatgccggttcccagaggaggaggaaggcggctgcgaactgcgcgtgaaattcagccgcagcgcagatgctccagcctacaagcaggggcagaaccagctctacaacgaactcaatcttggtcggagagaggagtacgacgtgctggacaagcggagaggacgggacccagaaatgggcgggaagccgcgcagaaagaatccccaagagggcctgtacaacgagctccaaaaggataagatggcagaagcctatagcgagattggtatgaaaggggaacgcagaagaggcaaaggccacgacggactgtaccagggactcagcaccgccaccaaggacacctatgacgctcttcacatgcaggccctgccgcctcgg

SEQ ID NO: 8621 - DNA, 1470 bp, synthetic construct
  misc_feature 1..1470: note = Description of Artificial Sequence: Synthetic polynucleotide
  source 1..1470: mol_type = other DNA
atggccctccctgtcaccgccctgctgcttccgctggctcttctgctccacgccgctcggcccgaagtccaactggtggagtccgggggagggctcgtgcagcccggaggcagccttcggctgtcgtgcgccgcctccgggttcacgttctcatcctacgcgatgtcgtgggtcagacaggcaccaggaaagggactggaatgggtgtccgccattagcggctccggcggtagcacctactatgccgactcagtgaagggaaggttcactatctcccgcgacaacagcaagaacaccctgtacctccaaatgaactctctgcgggccgaggataccgcggtgtactattgcgccaagatgggttggtccagcggatacttgggagccttcgacatttggggacagggcactactgtgaccgtgtcctccgggggtggcggatcgggaggcggcggctcgggtggagggggttccgaaatcgtgttgacccagtcaccgggaaccctctcgctgtccccgggagaacgggctacactgtcatgtagagcgtcccagtccgtggcttcctcgttcctggcctggtaccagcagaagccgggacaggcaccccgcctgctcatctacggagccagcggccgggcgaccggcatccctgaccgcttctccggttccggctcgggcaccgactttactctgaccattagcaggcttgagcccgaggattttgccgtgtactactgccaacactacggggggagccctcgcctgaccttcggaggcggaactaaggtcgatatcaaaaccactaccccagcaccgaggccacccaccccggctcctaccatcgcctcccagcctctgtccctgcgtccggaggcatgtagacccgcagctggtggggccgtgcatacccggggtcttgacttcgcctgcgatatctacatttgggcccctctggctggtacttgcggggtcctgctgctttcactcgtgatcactctttactgtaagcgcggtcggaagaagctgctgtacatctttaagcaacccttcatgaggcctgtgcagactactcaagaggaggacggctgttcatgccggttcccagaggaggaggaaggcggctgcgaactgcgcgtgaaattcagccgcagcgcagatgctccagcctacaagcaggggcagaaccagctctacaacgaactcaatcttggtcggagagaggagtacgacgtgctggacaagcggagaggacgggacccagaaatgggcgggaagccgcgcagaaagaatccccaagagggcctgtacaacgagctccaaaaggataagatggcagaagcctatagcgagattggtatgaaaggggaacgcagaagaggcaaaggccacgacggactgtaccagggactcagcaccgccaccaaggacacctatgacgctcttcacatgcaggccctgccgcctcgg

SEQ ID NO: 8622 - RNA, 20 nt, Homo sapiens
  source 1..20: mol_type = unassigned RNA
ccccttaggagtctgcacta

SEQ ID NO: 8623 - RNA, 20 nt, Homo sapiens
  source 1..20: mol_type = unassigned RNA
caacctgtcaatccagctca

SEQ ID NO: 8624 - RNA, 20 nt, Homo sapiens
  source 1..20: mol_type = unassigned RNA
cacccatgagaccctctccg

SEQ ID NO: 8625 - RNA, 20 nt, Homo sapiens
  source 1..20: mol_type = unassigned RNA
acccatgagaccctctccgt

SEQ ID NO: 8626 - RNA, 20 nt, Homo sapiens
  source 1..20: mol_type = unassigned RNA
cccatgagaccctctccgtg

SEQ ID NO: 8627 - RNA, 20 nt, Homo sapiens
  source 1..20: mol_type = unassigned RNA
tagagcacctatcatgaacg

SEQ ID NO: 8628 - RNA, 20 nt, Homo sapiens
  source 1..20: mol_type = unassigned RNA
catgaacgaggagaccaagt

SEQ ID NO: 8629 - RNA, 20 nt, Homo sapiens
  source 1..20: mol_type = unassigned RNA
ctcctaaggggagagaagac

SEQ ID NO: 8630 - RNA, 20 nt, Homo sapiens
  source 1..20: mol_type = unassigned RNA
ccatagtgcagactcctaag

SEQ ID NO: 8631 - RNA, 20 nt, Homo sapiens
  source 1..20: mol_type = unassigned RNA
tccatagtgcagactcctaa

SEQ ID NO: 8632 - RNA, 20 nt, Homo sapiens
  source 1..20: mol_type = unassigned RNA
ttccatagtgcagactccta

SEQ ID NO: 8633 - RNA, 20 nt, Homo sapiens
  source 1..20: mol_type = unassigned RNA
gtgccttgagctggattgac

SEQ ID NO: 8634 - RNA, 20 nt, Homo sapiens
  source 1..20: mol_type = unassigned RNA
gggctatgtgtgccttgagc

SEQ ID NO: 8635 - RNA, 20 nt, Homo sapiens
  source 1..20: mol_type = unassigned RNA
agagggtctcatgggtgtct

SEQ ID NO: 8636 - RNA, 20 nt, Homo sapiens
  source 1..20: mol_type = unassigned RNA
gagagggtctcatgggtgtc

SEQ ID NO: 8637 - RNA, 20 nt, Homo sapiens
  source 1..20: mol_type = unassigned RNA
ccccacggagagggtctcat

SEQ ID NO: 8638 - RNA, 20 nt, Homo sapiens
  source 1..20: mol_type = unassigned RNA
tccccacggagagggtctca

SEQ ID NO: 8639 - RNA, 20 nt, Homo sapiens
  source 1..20: mol_type = unassigned RNA
ctctagggtccccacggaga

SEQ ID NO: 8640 - RNA, 20 nt, Homo sapiens
  source 1..20: mol_type = unassigned RNA
gctctagggtccccacggag

SEQ ID NO: 8641 - RNA, 20 nt, Homo sapiens
  source 1..20: mol_type = unassigned RNA
taggtgctctagggtcccca

SEQ ID NO: 8642 - RNA, 20 nt, Homo sapiens
  source 1..20: mol_type = unassigned RNA
cgttcatgataggtgctcta

SEQ ID NO: 8643 - RNA, 20 nt, Homo sapiens
  source 1..20: mol_type = unassigned RNA
tcgttcatgataggtgctct

SEQ ID NO: 8644 - RNA, 20 nt, Homo sapiens
  source 1..20: mol_type = unassigned RNA
ttggtctcctcgttcatgat

SEQ ID NO: 8645 - RNA, 20 nt, Homo sapiens
  source 1..20: mol_type = unassigned RNA
ggagagaaaaatcacctact

SEQ ID NO: 8646 - RNA, 20 nt, Homo sapiens
  source 1..20: mol_type = unassigned RNA
cttccctgtccctccagggc

SEQ ID NO: 8647 - RNA, 20 nt, Homo sapiens
  source 1..20: mol_type = unassigned RNA
cctccagggctggctcctca

SEQ ID NO: 8648 - RNA, 20 nt, Homo sapiens
  source 1..20: mol_type = unassigned RNA
tggctcctcatggaccccgt

SEQ ID NO: 8649 - RNA, 20 nt, Homo sapiens
  source 1..20: mol_type = unassigned RNA
gaccccgttggcctccagct

SEQ ID NO: 8650 - RNA, 20 nt, Homo sapiens
  source 1..20: mol_type = unassigned RNA
agctcggcaacaagaacctg

SEQ ID NO: 8651 - RNA, 20 nt, Homo sapiens
  source 1..20: mol_type = unassigned RNA
acctgtggagctgtcttgtg

SEQ ID NO: 8652 - RNA, 20 nt, Homo sapiens
  source 1..20: mol_type = unassigned RNA
tgctcaccaaagacccagaa

SEQ ID NO: 8653 - RNA, 20 nt, Homo sapiens
  source 1..20: mol_type = unassigned RNA
gaagttcttcctccccaaca

SEQ ID NO: 8654 - RNA, 20 nt, Homo sapiens
  source 1..20: mol_type = unassigned RNA
cttcctccccaacacggacc

SEQ ID NO: 8655 - RNA, 20 nt, Homo sapiens
  source 1..20: mol_type = unassigned RNA
ccaacacggacctggattcc

SEQ ID NO: 8656 - RNA, 20 nt, Homo sapiens
  source 1..20: mol_type = unassigned RNA
ggattccaggaacgagacct

SEQ ID NO: 8657 - RNA, 20 nt, Homo sapiens
  source 1..20: mol_type = unassigned RNA
actcaacaagctgcatgtcc

SEQ ID NO: 8658 - RNA, 20 nt, Homo sapiens
  source 1..20: mol_type = unassigned RNA
ctcaacaagctgcatgtcca

SEQ ID NO: 8659 - RNA, 20 nt, Homo sapiens
  source 1..20: mol_type = unassigned RNA
caagctgcatgtccagggtt

SEQ ID NO: 8660 - RNA, 20 nt, Homo sapiens
  source 1..20: mol_type = unassigned RNA
atgtccagggttcggacacc

SEQ ID NO: 8661 - RNA, 20 nt, Homo sapiens
  source 1..20: mol_type = unassigned RNA
gtgctgctgctgagtacttt

SEQ ID NO: 8662 - RNA, 20 nt, Homo sapiens
  source 1..20: mol_type = unassigned RNA
agtacttttggctatgatga

SEQ ID NO: 8663 - RNA, 20 nt, Homo sapiens
  source 1..20: mol_type = unassigned RNA
ttttggctatgatgatggta

SEQ ID NO: 8664 - RNA, 20 nt, Homo sapiens
  source 1..20: mol_type = unassigned RNA
tttggctatgatgatggtaa

SEQ ID NO: 8665 - RNA, 20 nt, Homo sapiens
  source 1..20: mol_type = unassigned RNA
gctatgatgatggtaagggc

SEQ ID NO: 8666 - RNA, 20 nt, Homo sapiens
  source 1..20: mol_type = unassigned RNA
gagccagccctggagggaca

SEQ ID NO: 8667 - RNA, 20 nt, Homo sapiens
  source 1..20: mol_type = unassigned RNA
ggagccagccctggagggac

SEQ ID NO: 8668 - RNA, 20 nt, Homo sapiens
  source 1..20: mol_type = unassigned RNA
catgaggagccagccctgga

SEQ ID NO: 8669 - RNA, 20 nt, Homo sapiens
  source 1..20: mol_type = unassigned RNA
ccatgaggagccagccctgg

SEQ ID NO: 8670 - RNA, 20 nt, Homo sapiens
  source 1..20: mol_type = unassigned RNA
ggtccatgaggagccagccc

SEQ ID NO: 8671 - RNA, 20 nt, Homo sapiens
  source 1..20: mol_type = unassigned RNA
ggaggccaacggggtccatg

SEQ ID NO: 8672 - RNA, 20 nt, Homo sapiens
  source 1..20: mol_type = unassigned RNA
tgccgagctggaggccaacg

SEQ ID NO: 8673 - RNA, 20 nt, Homo sapiens
  source 1..20: mol_type = unassigned RNA
ttgccgagctggaggccaac

SEQ ID NO: 8674 - RNA, 20 nt, Homo sapiens
  source 1..20: mol_type = unassigned RNA
gttgccgagctggaggccaa

SEQ ID NO: 8675 - RNA, 20 nt, Homo sapiens
  source 1..20: mol_type = unassigned RNA
ggttcttgttgccgagctgg

SEQ ID NO: 8676 - RNA, 20 nt, Homo sapiens
  source 1..20: mol_type = unassigned RNA
acaggttcttgttgccgagc

SEQ ID NO: 8677 - RNA, 20 nt, Homo sapiens
  source 1..20: mol_type = unassigned RNA
gcctcacaagacagctccac

SEQ ID NO: 8678 - RNA, 20 nt, Homo sapiens
  source 1..20: mol_type = unassigned RNA
gttcagccattctgggtctt

SEQ ID NO: 8679 - RNA, 20 nt, Homo sapiens
  source 1..20: mol_type = unassigned RNA
tcttggcgttcagccattct

SEQ ID NO: 8680 - RNA, 20 nt, Homo sapiens
  source 1..20: mol_type = unassigned RNA
atcttggcgttcagccattc

SEQ ID NO: 8681 - RNA, 20 nt, Homo sapiens
  source 1..20: mol_type = unassigned RNA
ggggaggaagaacttcatct

SEQ ID NO: 8682 - RNA, 20 nt, Homo sapiens
  source 1..20: mol_type = unassigned RNA
aatccaggtccgtgttgggg

SEQ ID NO: 8683 - RNA, 20 nt, Homo sapiens
  source 1..20: mol_type = unassigned RNA
tggaatccaggtccgtgttg

SEQ ID NO: 8684 - RNA, 20 nt, Homo sapiens
  source 1..20: mol_type = unassigned RNA
ctggaatccaggtccgtgtt

SEQ ID NO: 8685 - RNA, 20 nt, Homo sapiens
  source 1..20: mol_type = unassigned RNA
cctggaatccaggtccgtgt

SEQ ID NO: 8686 - RNA, 20 nt, Homo sapiens
  source 1..20: mol_type = unassigned RNA
aggtctcgttcctggaatcc

SEQ ID NO: 8687 - RNA, 20 nt, Homo sapiens
  source 1..20: mol_type = unassigned RNA
agggtccaaggtctcgttcc

SEQ ID NO: 8688 - RNA, 20 nt, Homo sapiens
  source 1..20: mol_type = unassigned RNA
gactctctgttcagggtcca

SEQ ID NO: 8689 - RNA, 20 nt, Homo sapiens
  source 1..20: mol_type = unassigned RNA
gcaggatgactctctgttca

SEQ ID NO: 8690 - RNA, 20 nt, Homo sapiens
  source 1..20: mol_type = unassigned RNA
tgcaggatgactctctgttc

SEQ ID NO: 8691 - RNA, 20 nt, Homo sapiens
  source 1..20: mol_type = unassigned RNA
catgcagcttgttgagttgc

SEQ ID NO: 8692 - RNA, 20 nt, Homo sapiens
  source 1..20: mol_type = unassigned RNA
actgccaggtgtccgaaccc

SEQ ID NO: 8693 - RNA, 20 nt, Homo sapiens
  source 1..20: mol_type = unassigned RNA
acaatgaatgaaagactgcc

SEQ ID NO: 8694 - RNA, 20 nt, Homo sapiens
  source 1..20: mol_type = unassigned RNA
tgcagggttcaccagccagc

SEQ ID NO: 8695 - RNA, 20 nt, Homo sapiens
  source 1..20: mol_type = unassigned RNA
gcagggttcaccagccagct

SEQ ID NO: 8696 - RNA, 20 nt, Homo sapiens
  source 1..20: mol_type = unassigned RNA
caccagccagctgggagctg

SEQ ID NO: 8697 - RNA, 20 nt, Homo sapiens
  source 1..20: mol_type = unassigned RNA
accagccagctgggagctga

SEQ ID NO: 8698 - RNA, 20 nt, Homo sapiens
  source 1..20: mol_type = unassigned RNA
ccagccagctgggagctgag

SEQ ID NO: 8699 - RNA, 20 nt, Homo sapiens
  source 1..20: mol_type = unassigned RNA
cctgaatctcagctccacca

SEQ ID NO: 8700 - RNA, 20 nt, Homo sapiens
  source 1..20: mol_type = unassigned RNA
atctcagctccaccatggtg

SEQ ID NO: 8701 - RNA, 20 nt, Homo sapiens
  source 1..20: mol_type = unassigned RNA
agctccaccatggtgaggac

SEQ ID NO: 8702 - RNA, 20 nt, Homo sapiens
  source 1..20: mol_type = unassigned RNA
accatggtgaggactggagt

SEQ ID NO: 8703 - RNA, 20 nt, Homo sapiens
  source 1..20: mol_type = unassigned RNA
ccatggtgaggactggagtt

SEQ ID NO: 8704 - RNA, 20 nt, Homo sapiens
  source 1..20: mol_type = unassigned RNA
catggtgaggactggagttg

SEQ ID NO: 8705 - RNA, 20 nt, Homo sapiens
  source 1..20: mol_type = unassigned RNA
atggtgaggactggagttgg

SEQ ID NO: 8706 - RNA, 20 nt, Homo sapiens
  source 1..20: mol_type = unassigned RNA
tggtgaaccctgcaagagag

SEQ ID NO: 8707 - RNA, 20 nt, Homo sapiens
  source 1..20: mol_type = unassigned RNA
ctggtgaaccctgcaagaga

SEQ ID NO: 8708 - RNA, 20 nt, Homo sapiens
  source 1..20: mol_type = unassigned RNA
gctggtgaaccctgcaagag

SEQ ID NO: 8709 - RNA, 20 nt, Homo sapiens
  source 1..20: mol_type = unassigned RNA
cccctcagctcccagctggc

SEQ ID NO: 8710 - RNA, 20 nt, Homo sapiens
  source 1..20: mol_type = unassigned RNA
ttttcccctcagctcccagc

SEQ ID NO: 8711 - RNA, 20 nt, Homo sapiens
  source 1..20: mol_type = unassigned RNA
ggtggagctgagattcaggt

SEQ ID NO: 8712 - RNA, 20 nt, Homo sapiens
  source 1..20: mol_type = unassigned RNA
ccatggtggagctgagattc

SEQ ID NO: 8713 - RNA, 20 nt, Homo sapiens
  source 1..20: mol_type = unassigned RNA
aactccagtcctcaccatgg

SEQ ID NO: 8714 - RNA, 20 nt, Homo sapiens
  source 1..20: mol_type = unassigned RNA
cccaactccagtcctcacca

SEQ ID NO: 8715 - RNA, 20 nt, Homo sapiens
  source 1..20: mol_type = unassigned RNA
aagcgcccacatcagagctg

SEQ ID NO: 8716 - RNA, 20 nt, Homo sapiens
  source 1..20: mol_type = unassigned RNA
agcgcccacatcagagctgt

SEQ ID NO: 8717 - RNA, 20 nt, Homo sapiens
  source 1..20: mol_type = unassigned RNA
gctgtgggtcctcaccccgc

SEQ ID NO: 8718 - RNA, 20 nt, Homo sapiens
  source 1..20: mol_type = unassigned RNA
cagtgcaagaagcagcagct

SEQ ID NO: 8719 - RNA, 20 nt, Homo sapiens
  source 1..20: mol_type = unassigned RNA
tgcaagaagcagcagctagg

SEQ ID NO: 8720 - RNA, 20 nt, Homo sapiens
  source 1..20: mol_type = unassigned RNA
gcaagaagcagcagctaggt

SEQ ID NO: 8721 - RNA, 20 nt, Homo sapiens
  source 1..20: mol_type = unassigned RNA
cagctaggtgggtaccagtg

SEQ ID NO: 8722 - RNA, 20 nt, Homo sapiens
  source 1..20: mol_type = unassigned RNA
agctaggtgggtaccagtgt

SEQ ID NO: 8723 - RNA, 20 nt, Homo sapiens
  source 1..20: mol_type = unassigned RNA
gctaggtgggtaccagtgtg

SEQ ID NO: 8724 - RNA, 20 nt, Homo sapiens
  source 1..20: mol_type = unassigned RNA
ggcctgaaaaagcaaaggaa

SEQ ID NO: 8725 - RNA, 20 nt, Homo sapiens
  source 1..20: mol_type = unassigned RNA
aggcctgaaaaagcaaagga

SEQ ID NO: 8726 - RNA, 20 nt, Homo sapiens
  source 1..20: mol_type = unassigned RNA
cttcaggcctgaaaaagcaa

SEQ ID NO: 8727 - RNA, 20 nt, Homo sapiens
  source 1..20: mol_type = unassigned RNA
agctctgatgtgggcgcttc

SEQ ID NO: 8728 - RNA, 20 nt, Homo sapiens
  source 1..20: mol_type = unassigned RNA
aggacccacagctctgatgt

SEQ ID NO: 8729 - RNA, 20 nt, Homo sapiens
  source 1..20: mol_type = unassigned RNA
gaggacccacagctctgatg

SEQ ID NO: 8730 - RNA, 20 nt, Homo sapiens
  source 1..20: mol_type = unassigned RNA
gcactgcttccggcggggtg

SEQ ID NO: 8731 - RNA, 20 nt, Homo sapiens
  source 1..20: mol_type = unassigned RNA
ttcttgcactgcttccggcg

SEQ ID NO: 8732 - RNA, 20 nt, Homo sapiens
  source 1..20: mol_type = unassigned RNA
cttcttgcactgcttccggc

SEQ ID NO: 8733 - RNA, 20 nt, Homo sapiens
  source 1..20: mol_type = unassigned RNA
gcttcttgcactgcttccgg

SEQ ID NO: 8734 - RNA, 20 nt, Homo sapiens
  source 1..20: mol_type = unassigned RNA
gctgcttcttgcactgcttc

SEQ ID NO: 8735 - RNA, 20 nt, Homo sapiens
  source 1..20: mol_type = unassigned RNA
gtccctgccccttgcagagt

SEQ ID NO: 8736 - RNA, 20 nt, Homo sapiens
  source 1..20: mol_type = unassigned RNA
agaagtacctgcagctcctg

SEQ ID NO: 8737 - RNA, 20 nt, Homo sapiens
  source 1..20: mol_type = unassigned RNA
cctctgcccagcagcgctac

SEQ ID NO: 8738 - RNA, 20 nt, Homo sapiens
  source 1..20: mol_type = unassigned RNA
cgctacaggagccaaatccc

SEQ ID NO: 8739 - RNA, 20 nt, Homo sapiens
  source 1..20: mol_type = unassigned RNA
gctacaggagccaaatccct

SEQ ID NO: 8740 - RNA, 20 nt, Homo sapiens
  source 1..20: mol_type = unassigned RNA
aggagccaaatccctgggtc

SEQ ID NO: 8741 - RNA, 20 nt, Homo sapiens
  source 1..20: mol_type = unassigned RNA
ggagccaaatccctgggtca

SEQ ID NO: 8742 - RNA, 20 nt, Homo sapiens
  source 1..20: mol_type = unassigned RNA
gcagccccacgccttccacc

SEQ ID NO: 8743 - RNA, 20 nt, Homo sapiens
  source 1..20: mol_type = unassigned RNA
atgtccctccaatcctgcgc

SEQ ID NO: 8744 - RNA, 20 nt, Homo sapiens
  source 1..20: mol_type = unassigned RNA
tgtccctccaatcctgcgcc

SEQ ID NO: 8745 - RNA, 20 nt, Homo sapiens
  source 1..20: mol_type = unassigned RNA
cacagcatccttagacactc

SEQ ID NO: 8746 - RNA, 20 nt, Homo sapiens
  source 1..20: mol_type = unassigned RNA
agcatccttagacactccgg

SEQ ID NO: 8747 - RNA, 20 nt, Homo sapiens
  source 1..20: mol_type = unassigned RNA
gcatccttagacactccgga

SEQ ID NO: 8748 - RNA, 20 nt, Homo sapiens
  source 1..20: mol_type = unassigned RNA
catccttagacactccggag

SEQ ID NO: 8749 - RNA, 20 nt, Homo sapiens
  source 1..20: mol_type = unassigned RNA
atccttagacactccggagg

SEQ ID NO: 8750 - RNA, 20 nt, Homo sapiens
  source 1..20: mol_type = unassigned RNA
cactccggagggggccatta

SEQ ID NO: 8751 - RNA, 20 nt, Homo sapiens
  source 1..20: mol_type = unassigned RNA
actccggagggggccattat

SEQ ID NO: 8752 - RNA, 20 nt, Homo sapiens
  source 1..20: mol_type = unassigned RNA
ctccggagggggccattatg

SEQ ID NO: 8753 - RNA, 20 nt, Homo sapiens
  source 1..20: mol_type = unassigned RNA
tccggagggggccattatgg

SEQ ID NO: 8754 - RNA, 20 nt, Homo sapiens
  source 1..20: mol_type = unassigned RNA
ggccattatgggggacgtca

SEQ ID NO: 8755 - RNA, 20 nt, Homo sapiens
  source 1..20: mol_type = unassigned RNA
cattatgggggacgtcaagg

SEQ ID NO: 8756 - RNA, 20 nt, Homo sapiens
  source 1..20: mol_type = unassigned RNA
ggggacgtcaaggtggaaga

SEQ ID NO: 8757 - RNA, 20 nt, Homo sapiens
  source 1..20: mol_type = unassigned RNA
tggtgctgacgtgagcatct

SEQ ID NO: 8758 - RNA, 20 nt, Homo sapiens
  source 1..20: mol_type = unassigned RNA
tctcggacctcttcaacacc

SEQ ID NO: 8759 - RNA, 20 nt, Homo sapiens
  source 1..20: mol_type = unassigned RNA
ctcggacctcttcaacacca

SEQ ID NO: 8760 - RNA, 20 nt, Homo sapiens
  source 1..20: mol_type = unassigned RNA
cttcaacaccagggttaaca

SEQ ID NO: 8761 - RNA, 20 nt, Homo sapiens
  source 1..20: mol_type = unassigned RNA
ttcaacaccagggttaacaa

SEQ ID NO: 8762 - RNA, 20 nt, Homo sapiens
  source 1..20: mol_type = unassigned RNA
ccagggttaacaagggcccg

SEQ ID NO: 8763 - RNA, 20 nt, Homo sapiens
  source 1..20: mol_type = unassigned RNA
cagggttaacaagggcccga

SEQ ID NO: 8764 - RNA, 20 nt, Homo sapiens
  source 1..20: mol_type = unassigned RNA
cccgagggtgaccgtgcttt

SEQ ID NO: 8765 - RNA, 20 nt, Homo sapiens
  source 1..20: mol_type = unassigned RNA
ccgagggtgaccgtgctttt

SEQ ID NO: 8766 - RNA, 20 nt, Homo sapiens
  source 1..20: mol_type = unassigned RNA
cgagggtgaccgtgcttttg

SEQ ID NO: 8767 - RNA, 20 nt, Homo sapiens
  source 1..20: mol_type = unassigned RNA
ggtgaccgtgcttttgggga

SEQ ID NO: 8768 - RNA, 20 nt, Homo sapiens
  source 1..20: mol_type = unassigned RNA
accgtgcttttggggaaggc

SEQ ID NO: 8769 - RNA, 20 nt, Homo sapiens
  source 1..20: mol_type = unassigned RNA
gcttttggggaaggctggca

SEQ ID NO: 8770 - RNA, 20 nt, Homo sapiens
  source 1..20: mol_type = unassigned RNA
cttttggggaaggctggcat

SEQ ID NO: 8771 - RNA, 20 nt, Homo sapiens
  source 1..20: mol_type = unassigned RNA
tggcatgggcaagaccacgc

SEQ ID NO: 8772 - RNA, 20 nt, Homo sapiens
  source 1..20: mol_type = unassigned RNA
gcaagaccacgctggcccac

SEQ ID NO: 8773 - RNA, 20 nt, Homo sapiens
  source 1..20: mol_type = unassigned RNA
cccaccggctctgccagaag

SEQ ID NO: 8774 - RNA, 20 nt, Homo sapiens
  source 1..20: mol_type = unassigned RNA
ccaccggctctgccagaagt

SEQ ID NO: 8775 - RNA, 20 nt, Homo sapiens
  source 1..20: mol_type = unassigned RNA
gctctgccagaagtgggcag

SEQ ID NO: 8776 - RNA, 20 nt, Homo sapiens
  source 1..20: mol_type = unassigned RNA
ctctgccagaagtgggcaga

SEQ ID NO: 8777 - RNA, 20 nt, Homo sapiens
  source 1..20: mol_type = unassigned RNA
gggccatctgaactgtttcc

SEQ ID NO: 8778 - RNA, 20 nt, Homo sapiens
  source 1..20: mol_type = unassigned RNA
gccagctcaacttgatcacg

SEQ ID NO: 8779 - RNA, 20 nt, Homo sapiens
  source 1..20: mol_type = unassigned RNA
tctgtacctgagccctgaat

SEQ ID NO: 8780 - RNA, 20 nt, Homo sapiens
  source 1..20: mol_type = unassigned RNA
cgacactgtcttccagtacc

SEQ ID NO: 8781 - RNA, 20 nt, Homo sapiens
  source 1..20: mol_type = unassigned RNA
caagtcctgctgatctttga

SEQ ID NO: 8782 - RNA, 20 nt, Homo sapiens
  source 1..20: mol_type = unassigned RNA
aagtcctgctgatctttgat

SEQ ID NO: 8783 - RNA, 20 nt, Homo sapiens
  source 1..20: mol_type = unassigned RNA
gatctttgatgggctagatg

SEQ ID NO: 8784 - RNA, 20 nt, Homo sapiens
  source 1..20: mol_type = unassigned RNA
agatgaggccctccagccta

SEQ ID NO: 8785 - RNA, 20 nt, Homo sapiens
  source 1..20: mol_type = unassigned RNA
gatgaggccctccagcctat

SEQ ID NO: 8786 - RNA, 20 nt, Homo sapiens
  source 1..20: mol_type = unassigned RNA
ctccagcctatgggtcctga

SEQ ID NO: 8787 - RNA, 20 nt, Homo sapiens
  source 1..20: mol_type = unassigned RNA
cctatgggtcctgatggccc

SEQ ID NO: 8788 - RNA, 20 nt, Homo sapiens
  source 1..20: mol_type = unassigned RNA
cttttctcccatctctgcaa

SEQ ID NO: 8789 - RNA, 20 nt, Homo sapiens
  source 1..20: mol_type = unassigned RNA
ttttctcccatctctgcaat

SEQ ID NO: 8790 - RNA, 20 nt, Homo sapiens
  source 1..20: mol_type = unassigned RNA
gcctgcctgcctgcctgcag

SEQ ID NO: 8791 - RNA, 20 nt, Homo sapiens
  source 1..20: mol_type = unassigned RNA
cctgcctgcagaggcagcca

SEQ ID NO: 8792 - RNA, 20 nt, Homo sapiens
  source 1..20: mol_type = unassigned RNA
ggcagccatggtccacatgt

SEQ ID NO: 8793 - RNA, 20 nt, Homo sapiens
  source 1..20: mol_type = unassigned RNA
gcagccatggtccacatgtt

SEQ ID NO: 8794 - RNA, 20 nt, Homo sapiens
  source 1..20: mol_type = unassigned RNA
gtccacatgttgggctttga

SEQ ID NO: 8795 - RNA, 20 nt, Homo sapiens
  source 1..20: mol_type = unassigned RNA
tccacatgttgggctttgat

SEQ ID NO: 8796 - RNA, 20 nt, Homo sapiens
  source 1..20: mol_type = unassigned RNA
tgttgggctttgatgggcca

SEQ ID NO: 8797 - RNA, 20 nt, Homo sapiens
  source 1..20: mol_type = unassigned RNA
gttgggctttgatgggccac

SEQ ID NO: 8798 - RNA, 20 nt, Homo sapiens
  source 1..20: mol_type = unassigned RNA
gggctttgatgggccacggg

SEQ ID NO: 8799 - RNA, 20 nt, Homo sapiens
  source 1..20: mol_type = unassigned RNA
tcttcagcgcccagccatcg

SEQ ID NO: 8800 - RNA, 20 nt, Homo sapiens
  source 1..20: mol_type = unassigned RNA
cttcagcgcccagccatcgc

SEQ ID NO: 8801 - RNA, 20 nt, Homo sapiens
  source 1..20: mol_type = unassigned RNA
cagcgcccagccatcgcggg

SEQ ID NO: 8802 - RNA, 20 nt, Homo sapiens
  source 1..20: mol_type = unassigned RNA
agcgcccagccatcgcggga

SEQ ID NO: 8803 - RNA, 20 nt, Homo sapiens
  source 1..20: mol_type = unassigned RNA
gcgcccagccatcgcgggag

SEQ ID NO: 8804 - RNA, 20 nt, Homo sapiens
  source 1..20: mol_type = unassigned RNA
cgcccagccatcgcgggagg

SEQ ID NO: 8805 - RNA, 20 nt, Homo sapiens
  source 1..20: mol_type = unassigned RNA
gccatcgcgggagggggccc

SEQ ID NO: 8806 - RNA, 20 nt, Homo sapiens
  source 1..20: mol_type = unassigned RNA
atcgcgggagggggccctgg

SEQ ID NO: 8807 - RNA, 20 nt, Homo sapiens
  source 1..20: mol_type = unassigned RNA
ctggtggagttacagacaaa

SEQ ID NO: 8808 - RNA, 20 nt, Homo sapiens
  source 1..20: mol_type = unassigned RNA
acgtctccgaagcctgtgtg

SEQ ID NO: 8809 - RNA, 20 nt, Homo sapiens
  source 1..20: mol_type = unassigned RNA
ctgcttcctgaccacgcccc

SEQ ID NO: 8810 - RNA, 20 nt, Homo sapiens
  source 1..20: mol_type = unassigned RNA
ccacgccccaggccagtctg

SEQ ID NO: 8811 - RNA, 20 nt, Homo sapiens
  source 1..20: mol_type = unassigned RNA
gactcagctctatatgcaga

SEQ ID NO: 8812 - RNA, 20 nt, Homo sapiens
  source 1..20: mol_type = unassigned RNA
gtgctcgccctcagcccccc

SEQ ID NO: 8813 - RNA, 20 nt, Homo sapiens
  source 1..20: mol_type = unassigned RNA
tgctcgccctcagcccccct

SEQ ID NO: 8814 - RNA, 20 nt, Homo sapiens
  source 1..20: mol_type = unassigned RNA
cttgcccacctcgtccctac

SEQ ID NO: 8815 - RNA, 20 nt, Homo sapiens
  source 1..20: mol_type = unassigned RNA
cacctcgtccctactggacc

SEQ ID NO: 8816 - RNA, 20 nt, Homo sapiens
  source 1..20: mol_type = unassigned RNA
acctcgtccctactggacct

SEQ ID NO: 8817 - RNA, 20 nt, Homo sapiens
  source 1..20: mol_type = unassigned RNA
cctcgtccctactggacctg

SEQ ID NO: 8818 - RNA, 20 nt, Homo sapiens
  source 1..20: mol_type = unassigned RNA
ctcgtccctactggacctgg

SEQ ID NO: 8819 - RNA, 20 nt, Homo sapiens
  source 1..20: mol_type = unassigned RNA
gtccctactggacctggggg

SEQ ID NO: 8820 - RNA, 20 nt, Homo sapiens
  source 1..20: mol_type = unassigned RNA
cctactggacctgggggagg

SEQ ID NO: 8821 - RNA, 20 nt, Homo sapiens
  source 1..20: mol_type = unassigned RNA
acctgggggaggtggccctg

SEQ ID NO: 8822 - RNA, 20 nt, Homo sapiens
  source 1..20: mol_type = unassigned RNA
cctgggggaggtggccctga

SEQ ID NO: 8823 - RNA, 20 nt, Homo sapiens
  source 1..20: mol_type = unassigned RNA
ctgggggaggtggccctgag

SEQ ID NO: 8824 - RNA, 20 nt, Homo sapiens
  source 1..20: mol_type = unassigned RNA
ggaggtggccctgaggggcc

SEQ ID NO: 8825 - RNA, 20 nt, Homo sapiens
  source 1..20: mol_type = unassigned RNA
gccctgaggggcctggagac

SEQ ID NO: 8826 - RNA, 20 nt, Homo sapiens
  source 1..20: mol_type = unassigned RNA
ccctgaggggcctggagaca

SEQ ID NO: 8827 - RNA, 20 nt, Homo sapiens
  source 1..20: mol_type = unassigned RNA
gaggggcctggagacaggga

SEQ ID NO: 8828 - RNA, 20 nt, Homo sapiens
  source 1..20: mol_type = unassigned RNA
gctccacccttgatagcttt

SEQ ID NO: 8829 - RNA, 20 nt, Homo sapiens
  source 1..20: mol_type = unassigned RNA
ctccacccttgatagctttt

SEQ ID NO: 8830 - RNA, 20 nt, Homo sapiens
  source 1..20: mol_type = unassigned RNA
tccacccttgatagcttttg

SEQ ID NO: 8831 - RNA, 20 nt, Homo sapiens
  source 1..20: mol_type = unassigned RNA
acttccttctgcgtctgcac

SEQ ID NO: 8832 - RNA, 20 nt, Homo sapiens
  source 1..20: mol_type = unassigned RNA
ttctgcgtctgcacaggccc

SEQ ID NO: 8833 - RNA, 20 nt, Homo sapiens
  source 1..20: mol_type = unassigned RNA
tctgcgtctgcacaggccct

SEQ ID NO: 8834 - RNA, 20 nt, Homo sapiens
  source 1..20: mol_type = unassigned RNA
ggccctgggcaccagcagac

SEQ ID NO: 8835 - RNA, 20 nt, Homo sapiens
  source 1..20: mol_type = unassigned RNA
tttcacccacctcagcctgc

SEQ ID NO: 8836 - RNA, 20 nt, Homo sapiens
  source 1..20: mol_type = unassigned RNA
tcttgctgccctgcacctga

SEQ ID NO: 8837 - RNA, 20 nt, Homo sapiens
  source 1..20: mol_type = unassigned RNA
gcacctgatggccagcccca

SEQ ID NO: 8838 - RNA, 20 nt, Homo sapiens
  source 1..20: mol_type = unassigned RNA
atgttaccctccattcccgc

SEQ ID NO: 8839 - RNA, 20 nt, Homo sapiens
  source 1..20: mol_type = unassigned RNA
tgttaccctccattcccgct

SEQ ID NO: 8840 - RNA, 20 nt, Homo sapiens
  source 1..20: mol_type = unassigned RNA
tccattcccgctgggtacag

SEQ ID NO: 8841 - RNA, 20 nt, Homo sapiens
  source 1..20: mol_type = unassigned RNA
acagcggaccaaagctagac

SEQ ID NO: 8842 - RNA, 20 nt, Homo sapiens
  source 1..20: mol_type = unassigned RNA
cagcggaccaaagctagact

SEQ ID NO: 8843 - RNA, 20 nt, Homo sapiens
  source 1..20: mol_type = unassigned RNA
agaccacctccccaccttcc

SEQ ID NO: 8844 - RNA, 20 nt, Homo sapiens
  source 1..20: mol_type = unassigned RNA
ccacctccccaccttcctgg

SEQ ID NO: 8845 - RNA, 20 nt, Homo sapiens
  source 1..20: mol_type = unassigned RNA
cacctccccaccttcctggc

SEQ ID NO: 8846 - RNA, 20 nt, Homo sapiens
  source 1..20: mol_type = unassigned RNA
ccccaccttcctggcgggcc

SEQ ID NO: 8847 - RNA, 20 nt, Homo sapiens
  source 1..20: mol_type = unassigned RNA
ccgccccttccttagccacc

SEQ ID NO: 8848 - RNA, 20 nt, Homo sapiens
  source 1..20: mol_type = unassigned RNA
cttccttagccacctggcgc

SEQ ID NO: 8849 - RNA, 20 nt, Homo sapiens
  source 1..20: mol_type = unassigned RNA
ttccttagccacctggcgca

SEQ ID NO: 8850 - RNA, 20 nt, Homo sapiens
  source 1..20: mol_type = unassigned RNA
ccacctggcgcagggcaatg

SEQ ID NO: 8851 - RNA, 20 nt, Homo sapiens
  source 1..20: mol_type = unassigned RNA
gcagggcaatgaggactgtg

SEQ ID NO: 8852 - RNA, 20 nt, Homo sapiens
  source 1..20: mol_type = unassigned RNA
cagggcaatgaggactgtgt

SEQ ID NO: 8853 - RNA, 20 nt, Homo sapiens
  source 1..20: mol_type = unassigned RNA
ggactgtgtgggtgccaagc

SEQ ID NO: 8854 - RNA, 20 nt, Homo sapiens
  source 1..20: mol_type = unassigned RNA
caagcaggctgctgtagtgc

SEQ ID NO: 8855 - RNA, 20 nt, Homo sapiens
  source 1..20: mol_type = unassigned RNA
agtgcaggtgttgaagaagt

SEQ ID NO: 8856 - RNA, 20 nt, Homo sapiens
  source 1..20: mol_type = unassigned RNA
ttggccacccgcaagctcac

SEQ ID NO: 8857 - RNA, 20 nt, Homo sapiens
  source 1..20: mol_type = unassigned RNA
tggccacccgcaagctcaca

SEQ ID NO: 8858 - RNA, 20 nt, Homo sapiens
  source 1..20: mol_type = unassigned RNA
ccgcaagctcacagggccaa

SEQ ID NO: 8859 - RNA, 20 nt, Homo sapiens
  source 1..20: mol_type = unassigned RNA
tgtagagctgtgtcactgtg

SEQ ID NO: 8860 - RNA, 20 nt, Homo sapiens
  source 1..20: mol_type = unassigned RNA
tcactgtgtggatgagacac

SEQ ID NO: 8861 - RNA, 20 nt, Homo sapiens
  source 1..20: mol_type = unassigned RNA
tgagacacaggagcctgagc

SEQ ID NO: 8862 - RNA, 20 nt, Homo sapiens
  source 1..20: mol_type = unassigned RNA
cccactgacctgcaccgacc

SEQ ID NO: 8863 - RNA, 20 nt, Homo sapiens
  source 1..20: mol_type = unassigned RNA
tgaccaacatcctagagcac

SEQ ID NO: 8864 - RNA, 20 nt, Homo sapiens
  source 1..20: mol_type = unassigned RNA
gaccaacatcctagagcaca

SEQ ID NO: 8865 - RNA, 20 nt, Homo sapiens
  source 1..20: mol_type = unassigned RNA
caacatcctagagcacaggg

SEQ ID NO: 8866 - RNA, 20 nt, Homo sapiens
  source 1..20: mol_type = unassigned RNA
cagggaggcccccatccacc

SEQ ID NO: 8867 - RNA, 20 nt, Homo sapiens
  source 1..20: mol_type = unassigned RNA
cccatccacctggattttga

SEQ ID NO: 8868 - RNA, 20 nt, Homo sapiens
  source 1..20: mol_type = unassigned RNA
ggattttgatggctgtcccc

SEQ ID NO: 8869 - RNA, 20 nt, Homo sapiens
  source 1..20: mol_type = unassigned RNA
cctggagccccactgccctg

SEQ ID NO: 8870 - RNA, 20 nt, Homo sapiens
  source 1..20: mol_type = unassigned RNA
gccccactgccctgaggctc

SEQ ID NO: 8871 - RNA, 20 nt, Homo sapiens
  source 1..20: mol_type = unassigned RNA
cactgccctgaggctctggt

SEQ ID NO: 8872 - RNA, 20 nt, Homo sapiens
  source 1..20: mol_type = unassigned RNA
cctgaggctctggtaggctg

SEQ ID NO: 8873 - RNA, 20 nt, Homo sapiens
  source 1..20: mol_type = unassigned RNA
ctgaggctctggtaggctgt

SEQ ID NO: 8874 - RNA, 20 nt, Homo sapiens
  source 1..20: mol_type = unassigned RNA
gtgggcagatagagaatctc

SEQ ID NO: 8875 - RNA, 20 nt, Homo sapiens
  source 1..20: mol_type = unassigned RNA
gaatctcaggtgagtaagag

SEQ ID NO: 8876 - RNA, 20 nt, Homo sapiens
  source 1..20: mol_type = unassigned RNA
tctcaggtgagtaagagtgg

SEQ ID NO: 8877 - RNA, 20 nt, Homo sapiens
  source 1..20: mol_type = unassigned RNA
caggtgagtaagagtggagg

SEQ ID NO: 8878 - RNA, 20 nt, Homo sapiens
  source 1..20: mol_type = unassigned RNA
ggccaactctgcaaggggca

SEQ ID NO: 8879 - RNA, 20 nt, Homo sapiens
  source 1..20: mol_type = unassigned RNA
tggccaactctgcaaggggc

SEQ ID NO: 8880 - RNA, 20 nt, Homo sapiens
  source 1..20: mol_type = unassigned RNA
ttcttggccaactctgcaag

SEQ ID NO: 8881 - RNA, 20 nt, Homo sapiens
  source 1..20: mol_type = unassigned RNA
cttcttggccaactctgcaa

SEQ ID NO: 8882 - RNA, 20 nt, Homo sapiens
  source 1..20: mol_type = unassigned RNA
acttcttggccaactctgca

SEQ ID NO: 8883 - RNA, 20 nt, Homo sapiens
  source 1..20: mol_type = unassigned RNA
caggagctgcaggtacttct

SEQ ID NO: 8884 - RNA, 20 nt, Homo sapiens
  source 1..20: mol_type = unassigned RNA
cagaggtccgcaggagctgc

SEQ ID NO: 8885 - RNA, 20 nt, Homo sapiens
  source 1..20: mol_type = unassigned RNA
gctgctgggcagaggtccgc

SEQ ID NO: 8886 - RNA, 20 nt, Homo sapiens
  source 1..20: mol_type = unassigned RNA
cctgtagcgctgctgggcag

SEQ ID NO: 8887 - RNA, 20 nt, Homo sapiens
  source 1..20: mol_type = unassigned RNA
ttggctcctgtagcgctgct

SEQ ID NO: 8888 - RNA, 20 nt, Homo sapiens
  source 1..20: mol_type = unassigned RNA
tttggctcctgtagcgctgc

SEQ ID NO: 8889 - RNA, 20 nt, Homo sapiens
  source 1..20: mol_type = unassigned RNA
gctgccctgacccagggatt

SEQ ID NO: 8890 - RNA, 20 nt, Homo sapiens
  source 1..20: mol_type = unassigned RNA
cgtggggctgccctgaccca

SEQ ID NO: 8891 - RNA, 20 nt, Homo sapiens
  source 1..20: mol_type = unassigned RNA
gcgtggggctgccctgaccc

SEQ ID NO: 8892 - RNA, 20 nt, Homo sapiens
  source 1..20: mol_type = unassigned RNA
tagacctggtggaaggcgtg

SEQ ID NO: 8893 - RNA, 20 nt, Homo sapiens
  source 1..20: mol_type = unassigned RNA
atagacctggtggaaggcgt

SEQ ID NO: 8894 - RNA, 20 nt, Homo sapiens
  source 1..20: mol_type = unassigned RNA
catagacctggtggaaggcg

SEQ ID NO: 8895 - RNA, 20 nt, Homo sapiens
  source 1..20: mol_type = unassigned RNA
agggacatagacctggtgga

SEQ ID NO: 8896 - RNA, 20 nt, Homo sapiens
  source 1..20: mol_type = unassigned RNA
ttggagggacatagacctgg

SEQ ID NO: 8897 - RNA, 20 nt, Homo sapiens
  source 1..20: mol_type = unassigned RNA
ggattggagggacatagacc

SEQ ID NO: 8898 - RNA, 20 nt, Homo sapiens
  source 1..20: mol_type = unassigned RNA
tggcccggcgcaggattgga

SEQ ID NO: 8899 - RNA, 20 nt, Homo sapiens
  source 1..20: mol_type = unassigned RNA
gtggcccggcgcaggattgg

SEQ ID NO: 8900 - RNA, 20 nt, Homo sapiens
  source 1..20: mol_type = unassigned RNA
gctgtggcccggcgcaggat

SEQ ID NO: 8901 - RNA, 20 nt, Homo sapiens
  source 1..20: mol_type = unassigned RNA
aggatgctgtggcccggcgc

SEQ ID NO: 8902 - RNA, 20 nt, Homo sapiens
  source 1..20: mol_type = unassigned RNA
tgtctaaggatgctgtggcc

SEQ ID NO: 8903 - RNA, 20 nt, Homo sapiens
  source 1..20: mol_type = unassigned RNA
cggagtgtctaaggatgctg

SEQ ID NO: 8904 - RNA, 20 nt, Homo sapiens
  source 1..20: mol_type = unassigned RNA
ggccccctccggagtgtcta

SEQ ID NO: 8905 - RNA, 20 nt, Homo sapiens
  source 1..20: mol_type = unassigned RNA
tcccccataatggccccctc

SEQ ID NO: 8906 - RNA, 20 nt, Homo sapiens
  source 1..20: mol_type = unassigned RNA
caccttgacgtcccccataa

SEQ ID NO: 8907 - RNA, 20 nt, Homo sapiens
  source 1..20: mol_type = unassigned RNA
tgttaaccctggtgttgaag

SEQ ID NO: 8908 - RNA, 20 nt, Homo sapiens
  source 1..20: mol_type = unassigned RNA
cctcgggcccttgttaaccc

SEQ ID NO: 8909 - RNA, 20 nt, Homo sapiens
  source 1..20: mol_type = unassigned RNA
ccaaaagcacggtcaccctc

SEQ ID NO: 8910 - RNA, 20 nt, Homo sapiens
  source 1..20: mol_type = unassigned RNA
cccaaaagcacggtcaccct

SEQ ID NO: 8911 - RNA, 20 nt, Homo sapiens
  source 1..20: mol_type = unassigned RNA
gccagccttccccaaaagca

SEQ ID NO: 8912 - RNA, 20 nt, Homo sapiens
  source 1..20: mol_type = unassigned RNA
gcagagccggtgggccagcg

SEQ ID NO: 8913 - RNA, 20 nt, Homo sapiens
  source 1..20: mol_type = unassigned RNA
ccacttctggcagagccggt

SEQ ID NO: 8914 - RNA, 20 nt, Homo sapiens
  source 1..20: mol_type = unassigned RNA
cccacttctggcagagccgg

SEQ ID NO: 8915 - RNA, 20 nt, Homo sapiens
  source 1..20: mol_type = unassigned RNA
ctgcccacttctggcagagc

SEQ ID NO: 8916 - RNA, 20 nt, Homo sapiens
  source 1..20: mol_type = unassigned RNA
gatggccctctgcccacttc

SEQ ID NO: 8917 - RNA, 20 nt, Homo sapiens
  source 1..20: mol_type = unassigned RNA
gggcctggaaacagttcaga

SEQ ID NO: 8918 - RNA, 20 nt, Homo sapiens
  source 1..20: mol_type = unassigned RNA
attcaaaaaggaacagggcc

SEQ ID NO: 8919 - RNA, 20 nt, Homo sapiens
  source 1..20: mol_type = unassigned RNA
gcggaattcaaaaaggaaca

SEQ ID NO: 8920 - RNA, 20 nt, Homo sapiens
  source 1..20: mol_type = unassigned RNA
ggcggaattcaaaaaggaac

SEQ ID NO: 8921 - RNA, 20 nt, Homo sapiens
  source 1..20: mol_type = unassigned RNA
tgagctggcggaattcaaaa

SEQ ID NO: 8922 - RNA, 20 nt, Homo sapiens
  source 1..20: mol_type = unassigned RNA
tcgtgatcaagttgagctgg

SEQ ID NO: 8923 - RNA, 20 nt, Homo sapiens
  source 1..20: mol_type = unassigned RNA
acctcgtgatcaagttgagc

SEQ ID NO: 8924 - RNA, 20 nt, Homo sapiens
  source 1..20: mol_type = unassigned RNA
aaaggagctcggacggtgtc

SEQ ID NO: 8925 - RNA, 20 nt, Homo sapiens
  source 1..20: mol_type = unassigned RNA
agatcaaaaaggagctcgga

SEQ ID NO: 8926 - RNA, 20 nt, Homo sapiens
  source 1..20: mol_type = unassigned RNA
gtacagatcaaaaaggagct

SEQ ID NO: 8927 - RNA, 20 nt, Homo sapiens
  source 1..20: mol_type = unassigned RNA
ggctcaggtacagatcaaaa

SEQ ID NO: 8928 - RNA, 20 nt, Homo sapiens
  source 1..20: mol_type = unassigned RNA
cgtggtccgattcagggctc

SEQ ID NO: 8929 - RNA, 20 nt, Homo sapiens
  source 1..20: mol_type = unassigned RNA
cagtgtcgtggtccgattca

SEQ ID NO: 8930 - RNA, 20 nt, Homo sapiens
  source 1..20: mol_type = unassigned RNA
acagtgtcgtggtccgattc

SEQ ID NO: 8931 - RNA, 20 nt, Homo sapiens
  source 1..20: mol_type = unassigned RNA
ggtactggaagacagtgtcg

SEQ ID NO: 8932 - RNA, 20 nt, Homo sapiens
  source 1..20: mol_type = unassigned RNA
cagcgttcttctccaggtac

SEQ ID NO: 8933 - RNA, 20 nt, Homo sapiens
  source 1..20: mol_type = unassigned RNA
cttggtcagcgttcttctcc

SEQ ID NO: 8934 - RNA, 20 nt, Homo sapiens
  source 1..20: mol_type = unassigned RNA
catcaaagatcagcaggact

SEQ ID NO: 8935 - RNA, 20 nt, Homo sapiens
  source 1..20: mol_type = unassigned RNA
ctagcccatcaaagatcagc

SEQ ID NO: 8936 - RNA, 20 nt, Homo sapiens
  source 1..20: mol_type = unassigned RNA
atcaggacccataggctgga

SEQ ID NO: 8937 - RNA, 20 nt, Homo sapiens
  source 1..20: mol_type = unassigned RNA
catcaggacccataggctgg

SEQ ID NO: 8938 - RNA, 20 nt, Homo sapiens
  source 1..20: mol_type = unassigned RNA
ggccatcaggacccataggc

SEQ ID NO: 8939 - RNA, 20 nt, Homo sapiens
  source 1..20: mol_type = unassigned RNA
cctgggccatcaggacccat

SEQ ID NO: 8940 - RNA, 20 nt, Homo sapiens
  source 1..20: mol_type = unassigned RNA
aggactgggcctgggccatc

SEQ ID NO: 8941 - RNA, 20 nt, Homo sapiens
  source 1..20: mol_type = unassigned RNA
aaagggtgaggactgggcct

SEQ ID NO: 8942 - RNA, 20 nt, Homo sapiens
  source 1..20: mol_type = unassigned RNA
aaaagggtgaggactgggcc

SEQ ID NO: 8943 - RNA, 20 nt, Homo sapiens
  source 1..20: mol_type = unassigned RNA
gggagaaaagggtgaggact

SEQ ID NO: 8944 - RNA, 20 nt, Homo sapiens
  source 1..20: mol_type = unassigned RNA
tgggagaaaagggtgaggac

SEQ ID NO: 8945 - RNA, 20 nt, Homo sapiens
  source 1..20: mol_type = unassigned RNA
agagatgggagaaaagggtg

SEQ ID NO: 8946 - RNA, 20 nt, Homo sapiens
  source 1..20: mol_type = unassigned RNA
attgcagagatgggagaaaa

SEQ ID NO: 8947 - RNA, 20 nt, Homo sapiens
  source 1..20: mol_type = unassigned RNA
cattgcagagatgggagaaa

SEQ ID NO: 8948 - RNA, 20 nt, Homo sapiens
  source 1..20: mol_type = unassigned RNA
ctccgtcccattgcagagat

SEQ ID NO: 8949 - RNA, 20 nt, Homo sapiens
  source 1..20: mol_type = unassigned RNA
cctccgtcccattgcagaga

SEQ ID NO: 8950 - RNA, 20 nt, Homo sapiens
  source 1..20: mol_type = unassigned RNA
aaagcccaacatgtggacca

SEQ ID NO: 8951 - RNA, 20 nt, Homo sapiens
  source 1..20: mol_type = unassigned RNA
gcccatcaaagcccaacatg

SEQ ID NO: 8952 - RNA, 20 nt, Homo sapiens
  source 1..20: mol_type = unassigned RNA
ttcacatattcttccacccg

SEQ ID NO: 8953 - RNA, 20 nt, Homo sapiens
  source 1..20: mol_type = unassigned RNA
ggccccctcccgcgatggct

SEQ ID NO: 8954 - RNA, 20 nt, Homo sapiens
  source 1..20: mol_type = unassigned RNA
gggccccctcccgcgatggc

SEQ ID NO: 8955 - RNA, 20 nt, Homo sapiens
  source 1..20: mol_type = unassigned RNA
accagggccccctcccgcga

SEQ ID NO: 8956 - RNA, 20 nt, Homo sapiens
  source 1..20: mol_type = unassigned RNA
atttgtctgtaactccacca

SEQ ID NO: 8957 - RNA, 20 nt, Homo sapiens
  source 1..20: mol_type = unassigned RNA
catttgtctgtaactccacc

SEQ ID NO: 8958 - RNA, 20 nt, Homo sapiens
  source 1..20: mol_type = unassigned RNA
cgggcaccgcacacaggctt

SEQ ID NO: 8959 - RNA, 20 nt, Homo sapiens
  source 1..20: mol_type = unassigned RNA
acagtgcgggcaccgcacac

SEQ ID NO: 8960 - RNA, 20 nt, Homo sapiens
  source 1..20: mol_type = unassigned RNA
caggcgacttggcacagtgc

SEQ ID NO: 8961 - RNA, 20 nt, Homo sapiens
  source 1..20: mol_type = unassigned RNA
acaggcgacttggcacagtg

SEQ ID NO: 8962 - RNA, 20 nt, Homo sapiens
  source 1..20: mol_type = unassigned RNA
ggaggcagagacaggcgact

SEQ ID NO: 8963 - RNA, 20 nt, Homo sapiens
  source 1..20: mol_type = unassigned RNA
cagatggtggaggcagagac

SEQ ID NO: 8964 - RNA, 20 nt, Homo sapiens
  source 1..20: mol_type = unassigned RNA
ggtcaggaagcagatggtgg

SEQ ID NO: 8965 - RNA, 20 nt, Homo sapiens
  source 1..20: mol_type = unassigned RNA
cgtggtcaggaagcagatgg

SEQ ID NO: 8966 - RNA, 20 nt, Homo sapiens
  source 1..20: mol_type = unassigned RNA
gggcgtggtcaggaagcaga

SEQ ID NO: 8967 - RNA, 20 nt, Homo sapiens
  source 1..20: mol_type = unassigned RNA
gactggcctggggcgtggtc

SEQ ID NO: 8968 - RNA, 20 nt, Homo sapiens
  source 1..20: mol_type = unassigned RNA
ccacagactggcctggggcg

SEQ ID NO: 8969 - RNA, 20 nt, Homo sapiens
  source 1..20: mol_type = unassigned RNA
gagggccacagactggcctg

SEQ ID NO: 8970 - RNA, 20 nt, Homo sapiens
  source 1..20: mol_type = unassigned RNA
ggagggccacagactggcct

SEQ ID NO: 8971 - RNA, 20 nt, Homo sapiens
  source 1..20: mol_type = unassigned RNA
aggagggccacagactggcc

SEQ ID NO: 8972 - RNA, 20 nt, Homo sapiens
  source 1..20: mol_type = unassigned RNA
tgggcaggagggccacagac

SEQ ID NO: 8973 - RNA, 20 nt, Homo sapiens
  source 1..20: mol_type = unassigned RNA
ctgagtcatgttgggcagga

SEQ ID NO: 8974 - RNA, 20 nt, Homo sapiens
  source 1..20: mol_type = unassigned RNA
gctgagtcatgttgggcagg

SEQ ID NO: 8975 - RNA, 20 nt, Homo sapiens
  source 1..20: mol_type = unassigned RNA
agagctgagtcatgttgggc

SEQ ID NO: 8976 - RNA, 20 nt, Homo sapiens
  source 1..20: mol_type = unassigned RNA
atatagagctgagtcatgtt

SEQ ID NO: 8977 - RNA, 20 nt, Homo sapiens
  source 1..20: mol_type = unassigned RNA
catatagagctgagtcatgt

SEQ ID NO: 8978 - RNA, 20 nt, Homo sapiens
  source 1..20: mol_type = unassigned RNA
caagtgcccaggggggctga

SEQ ID NO: 8979 - RNA, 20 nt, Homo sapiens
  source 1..20: mol_type = unassigned RNA
gcaagtgcccaggggggctg

SEQ ID NO: 8980 - RNA, 20 nt, Homo sapiens
  source 1..20: mol_type = unassigned RNA
aggtgggcaagtgcccaggg

SEQ ID NO: 8981 - RNA, 20 nt, Homo sapiens
  source 1..20: mol_type = unassigned RNA
gaggtgggcaagtgcccagg

SEQ ID NO: 8982 - RNA, 20 nt, Homo sapiens
  source 1..20: mol_type = unassigned RNA
cgaggtgggcaagtgcccag

SEQ ID NO: 8983 - RNA, 20 nt, Homo sapiens
  source 1..20: mol_type = unassigned RNA
acgaggtgggcaagtgccca

SEQ ID NO: 8984 - RNA, 20 nt, Homo sapiens
  source 1..20: mol_type = unassigned RNA
gacgaggtgggcaagtgccc

SEQ ID NO: 8985 - RNA, 20 nt, Homo sapiens
  source 1..20: mol_type = unassigned RNA
aggtccagtagggacgaggt

SEQ ID NO: 8986 - RNA, 20 nt, Homo sapiens
  source 1..20: mol_type = unassigned RNA
caggtccagtagggacgagg

SEQ ID NO: 8987 - RNA, 20 nt, Homo sapiens
  source 1..20: mol_type = unassigned RNA
ccccaggtccagtagggacg

SEQ ID NO: 8988 - RNA, 20 nt, Homo sapiens
  source 1..20: mol_type = unassigned RNA
cacctcccccaggtccagta

SEQ ID NO: 8989 - RNA, 20 nt, Homo sapiens
  source 1..20: mol_type = unassigned RNA
ccacctcccccaggtccagt

SEQ ID NO: 8990 - RNA, 20 nt, Homo sapiens
  source 1..20: mol_type = unassigned RNA
ccctcagggccacctccccc

SEQ ID NO: 8991 - RNA, 20 nt, Homo sapiens
  source 1..20: mol_type = unassigned RNA
ccctgtctccaggcccctca

SEQ ID NO: 8992 - RNA, 20 nt, Homo sapiens
  source 1..20: mol_type = unassigned RNA
tccctgtctccaggcccctc

SEQ ID NO: 8993 - RNA, 20 nt, Homo sapiens
  source 1..20: mol_type = unassigned RNA
agataaccttccctgtctcc

SEQ ID NO: 8994 - RNA, 20 nt, Homo sapiens
  source 1..20: mol_type = unassigned RNA
gccccaaaagctatcaaggg

SEQ ID NO: 8995 - RNA, 20 nt, Homo sapiens
  source 1..20: mol_type = unassigned RNA
gtggccccaaaagctatcaa

SEQ ID NO: 8996 - RNA, 20 nt, Homo sapiens
  source 1..20: mol_type = unassigned RNA
agtggccccaaaagctatca

SEQ ID NO: 8997 - RNA, 20 nt, Homo sapiens
  source 1..20: mol_type = unassigned RNA
ggaagtcagcaggctgtgag

SEQ ID NO: 8998 - RNA, 20 nt, Homo sapiens
  source 1..20: mol_type = unassigned RNA
agacgcagaaggaagtcagc

SEQ ID NO: 8999 - RNA, 20 nt, Homo sapiens
  source 1..20: mol_type = unassigned RNA
agggcctgtgcagacgcaga

SEQ ID NO: 9000 - RNA, 20 nt, Homo sapiens
  source 1..20: mol_type = unassigned RNA
agcctgtctgctggtgccca

SEQ ID NO: 9001 - RNA, 20 nt, Homo sapiens
  source 1..20: mol_type = unassigned RNA
tagcctgtctgctggtgccc

SEQ ID NO: 9002 - RNA, 20 nt, Homo sapiens
  source 1..20: mol_type = unassigned RNA
tgaaagcatagcctgtctgc

SEQ ID NO: 9003 - RNA, 20 nt, Homo sapiens
  source 1..20: mol_type = unassigned RNA
aaactcctgcaggctgaggt

SEQ ID NO: 9004 - RNA, 20 nt, Homo sapiens
  source 1..20: mol_type = unassigned RNA
gaaactcctgcaggctgagg

SEQ ID NO: 9005 - RNA, 20 nt, Homo sapiens
  source 1..20: mol_type = unassigned RNA
caagaaactcctgcaggctg

SEQ ID NO: 9006 - RNA, 20 nt, Homo sapiens
  source 1..20: mol_type = unassigned RNA
gggcagcaagaaactcctgc

SEQ ID NO: 9007 - RNA, 20 nt, Homo sapiens
  source 1..20: mol_type = unassigned RNA
ggggctggccatcaggtgca

SEQ ID NO: 9008 - RNA, 20 nt, Homo sapiens
  source 1..20: mol_type = unassigned RNA
tggggctggccatcaggtgc

SEQ ID NO: 9009 - RNA, 20 nt, Homo sapiens
  source 1..20: mol_type = unassigned RNA
tcaccttggggctggccatc

SEQ ID NO: 9010 - RNA, 20 nt, Homo sapiens
  source 1..20: mol_type = unassigned RNA
gtctttgttcaccttggggc

SEQ ID NO: 9011 - RNA, 20 nt, Homo sapiens
  source 1..20: mol_type = unassigned RNA
gtgtgtctttgttcaccttg

SEQ ID NO: 9012 - RNA, 20 nt, Homo sapiens
  source 1..20: mol_type = unassigned RNA
agtgtgtctttgttcacctt

SEQ ID NO: 9013 - RNA, 20 nt, Homo sapiens
  source 1..20: mol_type = unassigned RNA
aagtgtgtctttgttcacct

SEQ ID NO: 9014 - RNA, 20 nt, Homo sapiens
  source 1..20: mol_type = unassigned RNA
ggaatggagggtaacatact

SEQ ID NO: 9015 - RNA, 20 nt, Homo sapiens
  source 1..20: mol_type = unassigned RNA
gggaatggagggtaacatac

SEQ ID NO: 9016 - RNA, 20 nt, Homo sapiens
  source 1..20: mol_type = unassigned RNA
ctgtacccagcgggaatgga

SEQ ID NO: 9017 - RNA, 20 nt, Homo sapiens
  source 1..20: mol_type = unassigned RNA
gctgtacccagcgggaatgg

SEQ ID NO: 9018 - RNA, 20 nt, Homo sapiens
  source 1..20: mol_type = unassigned RNA
tccgctgtacccagcgggaa

SEQ ID NO: 9019 - RNA, 20 nt, Homo sapiens
  source 1..20: mol_type = unassigned RNA
tttggtccgctgtacccagc

SEQ ID NO: 9020 - RNA, 20 nt, Homo sapiens
  source 1..20: mol_type = unassigned RNA
ctttggtccgctgtacccag

SEQ ID NO: 9021 - RNA, 20 nt, Homo sapiens
  source 1..20: mol_type = unassigned RNA
tgagaggcccagtctagctt

SEQ ID NO: 9022 - RNA, 20 nt, Homo sapiens
  source 1..20: mol_type = unassigned RNA
aggtggggaggtggtctgag

SEQ ID NO: 9023 - RNA, 20 nt, Homo sapiens
  source 1..20: mol_type = unassigned RNA
ccgccaggaaggtggggagg

SEQ ID NO: 9024 - RNA, 20 nt, Homo sapiens
  source 1..20: mol_type = unassigned RNA
ggcccgccaggaaggtgggg

SEQ ID NO: 9025 - RNA, 20 nt, Homo sapiens
  source 1..20: mol_type = unassigned RNA
ccaggcccgccaggaaggtg

SEQ ID NO: 9026 - RNA, 20 nt, Homo sapiens
  source 1..20: mol_type = unassigned RNA
gccaggcccgccaggaaggt

SEQ ID NO: 9027 - RNA, 20 nt, Homo sapiens
  source 1..20: mol_type = unassigned RNA
tgccaggcccgccaggaagg

SEQ ID NO: 9028 - RNA, 20 nt, Homo sapiens
  source 1..20: mol_type = unassigned RNA
ggatgccaggcccgccagga

SEQ ID NO: 9029 - RNA, 20 nt, Homo sapiens
  source 1..20: mol_type = unassigned RNA
tgcaggatgccaggcccgcc

SEQ ID NO: 9030 - RNA, 20 nt, Homo sapiens
  source 1..20: mol_type = unassigned RNA
ggcggcaggtgcaggatgcc

SEQ ID NO: 9031 - RNA, 20 nt, Homo sapiens
  source 1..20: mol_type = unassigned RNA
aaggaaggggcggcaggtgc

SEQ ID NO: 9032 - RNA, 20 nt, Homo sapiens
  source 1..20: mol_type = unassigned RNA
gtggctaaggaaggggcggc

SEQ ID NO: 9033 - RNA, 20 nt, Homo sapiens
  source 1..20: mol_type = unassigned RNA
ccaggtggctaaggaagggg

SEQ ID NO: 9034 - RNA, 20 nt, Homo sapiens
  source 1..20: mol_type = unassigned RNA
gcgccaggtggctaaggaag

SEQ ID NO: 9035 - RNA, 20 nt, Homo sapiens
  source 1..20: mol_type = unassigned RNA
tgcgccaggtggctaaggaa

SEQ ID NO: 9036 - RNA, 20 nt, Homo sapiens
  source 1..20: mol_type = unassigned RNA
ctgcgccaggtggctaagga

SEQ ID NO: 9037 - RNA, 20 nt, Homo sapiens
  source 1..20: mol_type = unassigned RNA
tgccctgcgccaggtggcta

SEQ ID NO: 9038 - RNA, 20 nt, Homo sapiens
  source 1..20: mol_type = unassigned RNA
cctcattgccctgcgccagg

SEQ ID NO: 9039 - RNA, 20 nt, Homo sapiens
  source 1..20: mol_type = unassigned RNA
agtcctcattgccctgcgcc

SEQ ID NO: 9040 - RNA, 20 nt, Homo sapiens
  source 1..20: mol_type = unassigned RNA
ctgcactacagcagcctgct

SEQ ID NO: 9041 - RNA, 20 nt, Homo sapiens
  source 1..20: mol_type = unassigned RNA
tggccctgtgagcttgcggg

SEQ ID NO: 9042 - RNA, 20 nt, Homo sapiens
  source 1..20: mol_type = unassigned RNA
ctttggccctgtgagcttgc

SEQ ID NO: 9043 - RNA, 20 nt, Homo sapiens
  source 1..20: mol_type = unassigned RNA
cctttggccctgtgagcttg

SEQ ID NO: 9044 - RNA, 20 nt, Homo sapiens
  source 1..20: mol_type = unassigned RNA
tgacacagctctacaacctt

SEQ ID NO: 9045 - RNA, 20 nt, Homo sapiens
  source 1..20: mol_type = unassigned RNA
gcggtgagactggccagctc

SEQ ID NO: 9046 - RNA, 20 nt, Homo sapiens
  source 1..20: mol_type = unassigned RNA
gaggctttgtgcggtgagac

SEQ ID NO: 9047 - RNA, 20 nt, Homo sapiens
  source 1..20: mol_type = unassigned RNA
ttgataggggaggctttgtg

SEQ ID NO: 9048 - RNA, 20 nt, Homo sapiens
  source 1..20: mol_type = unassigned RNA
ggaagggcagttgatagggg

SEQ ID NO: 9049 - RNA, 20 nt, Homo sapiens
  source 1..20: mol_type = unassigned RNA
tgtggaagggcagttgatag

SEQ ID NO: 9050 - RNA, 20 nt, Homo sapiens
  source 1..20: mol_type = unassigned RNA
ttgtggaagggcagttgata

SEQ ID NO: 9051 - RNA, 20 nt, Homo sapiens
  source 1..20: mol_type = unassigned RNA
attgtggaagggcagttgat

SEQ ID NO: 9052 - RNA, 20 nt, Homo sapiens
  source 1..20: mol_type = unassigned RNA
gtcagtgggaaattgtggaa

SEQ ID NO: 9053 - RNA, 20 nt, Homo sapiens
  source 1..20: mol_type = unassigned RNA
ggtcagtgggaaattgtgga

SEQ ID NO: 9054 - RNA, 20 nt, Homo sapiens
  source 1..20: mol_type = unassigned RNA
tgcaggtcagtgggaaattg

SEQ ID NO: 9055 - RNA, 20 nt, Homo sapiens
  source 1..20: mol_type = unassigned RNA
ccaggtcggtgcaggtcagt

SEQ ID NO: 9056 - RNA, 20 nt, Homo sapiens
  source 1..20: mol_type = unassigned RNA
gccaggtcggtgcaggtcag

SEQ ID NO: 9057 - RNA, 20 nt, Homo sapiens
  source 1..20: mol_type = unassigned RNA
cagggtggccaggtcggtgc

SEQ ID NO: 9058 - RNA, 20 nt, Homo sapiens
  source 1..20: mol_type = unassigned RNA
gttggtcagggtggccaggt

SEQ ID NO: 9059 - RNA, 20 nt, Homo sapiens
  source 1..20: mol_type = unassigned RNA
ggatgttggtcagggtggcc

SEQ ID NO: 9060 - RNA, 20 nt, Homo sapiens
  source 1..20: mol_type = unassigned RNA
ctctaggatgttggtcaggg

SEQ ID NO: 9061 - RNA, 20 nt, Homo sapiens
  source 1..20: mol_type = unassigned RNA
gtgctctaggatgttggtca

SEQ ID NO: 9062 - RNA, 20 nt, Homo sapiens
  source 1..20: mol_type = unassigned RNA
tgtgctctaggatgttggtc

SEQ ID NO: 9063 - RNA, 20 nt, Homo sapiens
  source 1..20: mol_type = unassigned RNA
ctccctgtgctctaggatgt

SEQ ID NO: 9064 - RNA, 20 nt, Homo sapiens
  source 1..20: mol_type = unassigned RNA
tgggggcctccctgtgctct

SEQ ID NO: 9065 - RNA, 20 nt, Homo sapiens
  source 1..20: mol_type = unassigned RNA
atcaaaatccaggtggatgg

SEQ ID NO: 9066 - RNA, 20 nt, Homo sapiens
  source 1..20: mol_type = unassigned RNA
catcaaaatccaggtggatg

SEQ ID NO: 9067 - RNA, 20 nt, Homo sapiens
  source 1..20: mol_type = unassigned RNA
ccatcaaaatccaggtggat

SEQ ID NO: 9068 - RNA, 20 nt, Homo sapiens
  source 1..20: mol_type = unassigned RNA
gccatcaaaatccaggtgga

SEQ ID NO: 9069 - RNA, 20 nt, Homo sapiens
  source 1..20: mol_type = unassigned RNA
gacagccatcaaaatccagg

SEQ ID NO: 9070 - RNA, 20 nt, Homo sapiens
  source 1..20: mol_type = unassigned RNA
ggggacagccatcaaaatcc

SEQ ID NO: 9071 - RNA, 20 nt, Homo sapiens
  source 1..20: mol_type = unassigned RNA
tcagggcagtggggctccag

SEQ ID NO: 9072 - RNA, 20 nt, Homo sapiens
  source 1..20: mol_type = unassigned RNA
ctcagggcagtggggctcca

SEQ ID NO: 9073 - RNA, 20 nt, Homo sapiens
  source 1..20: mol_type = unassigned RNA
cctcagggcagtggggctcc

SEQ ID NO: 9074 - RNA, 20 nt, Homo sapiens
  source 1..20: mol_type = unassigned RNA
accagagcctcagggcagtg

SEQ ID NO: 9075 - RNA, 20 nt, Homo sapiens
  source 1..20: mol_type = unassigned RNA
taccagagcctcagggcagt

SEQ ID NO: 9076 - RNA, 20 nt, Homo sapiens
  source 1..20: mol_type = unassigned RNA
ctaccagagcctcagggcag

SEQ ID NO: 9077 - RNA, 20 nt, Homo sapiens
  source 1..20: mol_type = unassigned RNA
cacagcctaccagagcctca

SEQ ID NO: 9078 - RNA, 20 nt, Homo sapiens
  source 1..20: mol_type = unassigned RNA
ccacagcctaccagagcctc

SEQ ID NO: 9079 - RNA, 20 nt, Homo sapiens
  source 1..20: mol_type = unassigned RNA
cttatggcagctttaagagc

SEQ ID NO: 9080 - RNA, 20 nt, Homo sapiens
  source 1..20: mol_type = unassigned RNA
agctttaagagcaggaagtg

SEQ ID NO: 9081 - RNA, 20 nt, Homo sapiens
  source 1..20: mol_type = unassigned RNA
gctttaagagcaggaagtgt

SEQ ID NO: 9082 - RNA, 20 nt, Homo sapiens
  source 1..20: mol_type = unassigned RNA
ctttaagagcaggaagtgtg

SEQ ID NO: 9083 - RNA, 20 nt, Homo sapiens
  source 1..20: mol_type = unassigned RNA
cctttgcagaagccctctcc

SEQ ID NO: 9084 - RNA, 20 nt, Homo sapiens
  source 1..20: mol_type = unassigned RNA
ctccaggagcttgccgacaa

SEQ ID NO: 9085 - RNA, 20 nt, Homo sapiens
  source 1..20: mol_type = unassigned RNA
tccaggagcttgccgacaat

SEQ ID NO: 9086 - RNA, 20 nt, Homo sapiens
  source 1..20: mol_type = unassigned RNA
ccaggagcttgccgacaatg

SEQ ID NO: 9087 - RNA, 20 nt, Homo sapiens
  source 1..20: mol_type = unassigned RNA
ggagcttgccgacaatgggg

SEQ ID NO: 9088 - RNA, 20 nt, Homo sapiens
  source 1..20: mol_type = unassigned RNA
aatggggaggctgcagatgc

SEQ ID NO: 9089 - RNA, 20 nt, Homo sapiens
  source 1..20: mol_type = unassigned RNA
atggggaggctgcagatgct

SEQ ID NO: 9090 - RNA, 20 nt, Homo sapiens
  source 1..20: mol_type = unassigned RNA
tggggaggctgcagatgctg

SEQ ID NO: 9091 - RNA, 20 nt, Homo sapiens
  source 1..20: mol_type = unassigned RNA
tgcagatgctggggtgagcc

SEQ ID NO: 9092 - RNA, 20 nt, Homo sapiens
  source 1..20: mol_type = unassigned RNA
tgctggggtgagccaggcct

SEQ ID NO: 9093 - RNA, 20 nt, Homo sapiens
  source 1..20: mol_type = unassigned RNA
cctggagagggcttctgcaa

SEQ ID NO: 9094 - RNA, 20 nt, Homo sapiens
  source 1..20: mol_type = unassigned RNA
tgtcggcaagctcctggaga

SEQ ID NO: 9095 - RNA, 20 nt, Homo sapiens
  source 1..20: mol_type = unassigned RNA
ttgtcggcaagctcctggag

SEQ ID NO: 9096 - RNA, 20 nt, Homo sapiens
  source 1..20: mol_type = unassigned RNA
ccccattgtcggcaagctcc

SEQ ID NO: 9097 - RNA, 20 nt, Homo sapiens
  source 1..20: mol_type = unassigned RNA
atctgcagcctccccattgt

SEQ ID NO: 9098 - RNA, 20 nt, Homo sapiens
  source 1..20: mol_type = unassigned RNA
tgcttactctgtaggttagc

SEQ ID NO: 9099 - RNA, 20 nt, Homo sapiens
  source 1..20: mol_type = unassigned RNA
ggaagtaaaatcactgcccg

SEQ ID NO: 9100 - RNA, 20 nt, Homo sapiens
  source 1..20: mol_type = unassigned RNA
tgcccgaggcatcagccacc

SEQ ID NO: 9101 - RNA, 20 nt, Homo sapiens
  source 1..20: mol_type = unassigned RNA
gtccacagctgaaagaagtc

SEQ ID NO: 9102 - RNA, 20 nt, Homo sapiens
  source 1..20: mol_type = unassigned RNA
aagtcaggtgagtgatctcc

SEQ ID NO: 9103 - RNA, 20 nt, Homo sapiens
  source 1..20: mol_type = unassigned RNA
tcaggtgagtgatctccagg

SEQ ID NO: 9104 - RNA, 20 nt, Homo sapiens
  source 1..20: mol_type = unassigned RNA
caggtgagtgatctccagga

SEQ ID NO: 9105 - RNA, 20 nt, Homo sapiens
  source 1..20: mol_type = unassigned RNA
caccaggtggctgatgcctc

SEQ ID NO: 9106 - RNA, 20 nt, Homo sapiens
  source 1..20: mol_type = unassigned RNA
tcaccaggtggctgatgcct

SEQ ID NO: 9107 - RNA, 20 nt, Homo sapiens
  source 1..20: mol_type = unassigned RNA
gaggcaaagctttcaccagg

SEQ ID NO: 9108 - RNA, 20 nt, Homo sapiens
  source 1..20: mol_type = unassigned RNA
agagaggcaaagctttcacc

SEQ ID NO: 9109 - RNA, 20 nt, Homo sapiens
  source 1..20: mol_type = unassigned RNA
tctttcagctgtggacagag

SEQ ID NO: 9110 - RNA, 20 nt, Homo sapiens
  source 1..20: mol_type = unassigned RNA
cacctgacttctttcagctg

SEQ ID NO: 9111 - RNA, 20 nt, Homo sapiens
  source 1..20: mol_type = unassigned RNA
cttggtctcctcgcagtttt

SEQ ID NO: 9112 - RNA, 20 nt, Homo sapiens
  source 1..20: mol_type = unassigned RNA
ttggtctcctcgcagttttc

SEQ ID NO: 9113 - RNA, 20 nt, Homo sapiens
  source 1..20: mol_type = unassigned RNA
ggacaaccagctcagtgacc

SEQ ID NO: 9114 - RNA, 20 nt, Homo sapiens
  source 1..20: mol_type = unassigned RNA
caaccagctcagtgaccagg

SEQ ID NO: 9115 - RNA, 20 nt, Homo sapiens
  source 1..20: mol_type = unassigned RNA
ccaggtggtgctgaacattg

SEQ ID NO: 9116 - RNA, 20 nt, Homo sapiens
  source 1..20: mol_type = unassigned RNA
ggtggtgctgaacattgtgg

SEQ ID NO: 9117 - RNA, 20 nt, Homo sapiens
  source 1..20: mol_type = unassigned RNA
aggttctccctcacctacca

SEQ ID NO: 9118 - RNA, 20 nt, Homo sapiens
  source 1..20: mol_type = unassigned RNA
tccctcacctaccacggctc

SEQ ID NO: 9119 - RNA, 20 nt, Homo sapiens
  source 1..20: mol_type = unassigned RNA
cgaaaactgcgaggagacca

SEQ ID NO: 9120 - RNA, 20 nt, Homo sapiens
  source 1..20: mol_type = unassigned RNA
tggttgtcccgaaaactgcg

SEQ ID NO: 9121 - RNA, 20 nt, Homo sapiens
  source 1..20: mol_type = unassigned RNA
gcaccacctggtcactgagc

SEQ ID NO: 9122 - RNA, 20 nt, Homo sapiens
  source 1..20: mol_type = unassigned RNA
ccacaatgttcagcaccacc

SEQ ID NO: 9123 - RNA, 20 nt, Homo sapiens
  source 1..20: mol_type = unassigned RNA
tccggagccgtggtaggtga

SEQ ID NO: 9124 - RNA, 20 nt, Homo sapiens
  source 1..20: mol_type = unassigned RNA
ttccggagccgtggtaggtg

SEQ ID NO: 9125 - RNA, 20 nt, Homo sapiens
  source 1..20: mol_type = unassigned RNA
caagcttccggagccgtggt

SEQ ID NO: 9126 - RNA, 20 nt, Homo sapiens
  source 1..20: mol_type = unassigned RNA
tactcaagcttccggagccg

SEQ ID NO: 9127 - RNA, 20 nt, Homo sapiens
  source 1..20: mol_type = unassigned RNA
agatcacttactcaagcttc

SEQ ID NO: 9128 - RNA, 20 nt, Homo sapiens
  source 1..20: mol_type = unassigned RNA
cgtgtcaaccctactctgct

SEQ ID NO: 9129 - RNA, 20 nt, Homo sapiens
  source 1..20: mol_type = unassigned RNA
caaccctactctgcttggca

SEQ ID NO: 9130 - RNA, 20 nt, Homo sapiens
  source 1..20: mol_type = unassigned RNA
aaccctactctgcttggcaa

SEQ ID NO: 9131 - RNA, 20 nt, Homo sapiens
  source 1..20: mol_type = unassigned RNA
cctactctgcttggcaaggg

SEQ ID NO: 9132 - RNA, 20 nt, Homo sapiens
  source 1..20: mol_type = unassigned RNA
cagtcacgtgtcctaccgtc

SEQ ID NO: 9133 - RNA, 20 nt, Homo sapiens
  source 1..20: mol_type = unassigned RNA
tcctaccgtcaggatgcttc

SEQ ID NO: 9134 - RNA, 20 nt, Homo sapiens
  source 1..20: mol_type = unassigned RNA
ccgtcaggatgcttcaggcc

SEQ ID NO: 9135 - RNA, 20 nt, Homo sapiens
  source 1..20: mol_type = unassigned RNA
cttcaggccaggtgagcaga

SEQ ID NO: 9136 - RNA, 20 nt, Homo sapiens
  source 1..20: mol_type = unassigned RNA
ggccaggtgagcagaaggaa

SEQ ID NO: 9137 - RNA, 20 nt, Homo sapiens
  source 1..20: mol_type = unassigned RNA
gccaggtgagcagaaggaaa

SEQ ID NO: 9138 - RNA, 20 nt, Homo sapiens
  source 1..20: mol_type = unassigned RNA
aggctgcaagattgtggcaa

SEQ ID NO: 9139 - RNA, 20 nt, Homo sapiens
  source 1..20: mol_type = unassigned RNA
ctgctcaggctgcaagattg

SEQ ID NO: 9140 - RNA, 20 nt, Homo sapiens
  source 1..20: mol_type = unassigned RNA
cgcagatgctgttgctgctc

SEQ ID NO: 9141 - RNA, 20 nt, Homo sapiens
  source 1..20: mol_type = unassigned RNA
cacccttgccaagcagagta

SEQ ID NO: 9142 - RNA, 20 nt, Homo sapiens
  source 1..20: mol_type = unassigned RNA
ccacccttgccaagcagagt

SEQ ID NO: 9143 - RNA, 20 nt, Homo sapiens
  source 1..20: mol_type = unassigned RNA
gcctgaagcatcctgacggt

SEQ ID NO: 9144 - RNA, 20 nt, Homo sapiens
  source 1..20: mol_type = unassigned RNA
cctggcctgaagcatcctga

SEQ ID NO: 9145 - RNA, 20 nt, Homo sapiens
  source 1..20: mol_type = unassigned RNA
tccctttccttctgctcacc

SEQ ID NO: 9146 - RNA, 20 nt, Homo sapiens
  source 1..20: mol_type = unassigned RNA
tggtatctgatcctgcaggg

SEQ ID NO: 9147 - RNA, 20 nt, Homo sapiens
  source 1..20: mol_type = unassigned RNA
tatctgatcctgcagggagg

SEQ ID NO: 9148 - RNA, 20 nt, Homo sapiens
  source 1..20: mol_type = unassigned RNA
agacaactgcagagctacaa

SEQ ID NO: 9149 - RNA, 20 nt, Homo sapiens
  source 1..20: mol_type = unassigned RNA
tacaaaggtaagaagccaag

SEQ ID NO: 9150 - RNA, 20 nt, Homo sapiens
  source 1..20: mol_type = unassigned RNA
aaaggtaagaagccaagagg

SEQ ID NO: 9151 - RNA, 20 nt, Homo sapiens
  source 1..20: mol_type = unassigned RNA
gatgaggtccgcctccctgc

SEQ ID NO: 9152 - RNA, 20 nt, Homo sapiens
  source 1..20: mol_type = unassigned RNA
gcggggaaagaaggaagatg

SEQ ID NO: 9153 - RNA, 20 nt, Homo sapiens
  source 1..20: mol_type = unassigned RNA
tctctgtgggcggggaaaga

SEQ ID NO: 9154 - RNA, 20 nt, Homo sapiens
  source 1..20: mol_type = unassigned RNA
tgcagttgtctctgtgggcg

SEQ ID NO: 9155 - RNA, 20 nt, Homo sapiens
  source 1..20: mol_type = unassigned RNA
ctgcagttgtctctgtgggc

SEQ ID NO: 9156 - RNA, 20 nt, Homo sapiens
  source 1..20: mol_type = unassigned RNA
tctgcagttgtctctgtggg

SEQ ID NO: 9157 - RNA, 20 nt, Homo sapiens
  source 1..20: mol_type = unassigned RNA
agctctgcagttgtctctgt

SEQ ID NO: 9158 - RNA, 20 nt, Homo sapiens
  source 1..20: mol_type = unassigned RNA
tagctctgcagttgtctctg

SEQ ID NO: 9159 - RNA, 20 nt, Homo sapiens
  source 1..20: mol_type = unassigned RNA
tgccagagctccagacctgc

SEQ ID NO: 9160 - RNA, 20 nt, Homo sapiens
  source 1..20: mol_type = unassigned RNA
ccagacctgcaggaaagtga

SEQ ID NO: 9161 - RNA, 20 nt, Homo sapiens
  source 1..20: mol_type = unassigned RNA
tgcaggaaagtgacggccag

SEQ ID NO: 9162 - RNA, 20 nt, Homo sapiens
  source 1..20: mol_type = unassigned RNA
gaaagtgacggccagaggaa

SEQ ID NO: 9163 - RNA, 20 nt, Homo sapiens
  source 1..20: mol_type = unassigned RNA
aaagtgacggccagaggaaa

SEQ ID NO: 9164 - RNA, 20 nt, Homo sapiens
  source 1..20: mol_type = unassigned RNA
aagtgacggccagaggaaag

SEQ ID NO: 9165 - RNA, 20 nt, Homo sapiens
  source 1..20: mol_type = unassigned RNA
agagcagaagcttgacgctc

SEQ ID NO: 9166 - RNA, 20 nt, Homo sapiens
  source 1..20: mol_type = unassigned RNA
agcttgacgctcaggtacct

SEQ ID NO: 9167 - RNA, 20 nt, Homo sapiens
  source 1..20: mol_type = unassigned RNA
ttgacgctcaggtaccttgg

SEQ ID NO: 9168 - RNA, 20 nt, Homo sapiens
  source 1..20: mol_type = unassigned RNA
tgacgctcaggtaccttgga

SEQ ID NO: 9169 - RNA, 20 nt, Homo sapiens
  source 1..20: mol_type = unassigned RNA
ttcctgcaggtctggagctc

SEQ ID NO: 9170 - RNA, 20 nt, Homo sapiens
  source 1..20: mol_type = unassigned RNA
ccgtcactttcctgcaggtc

SEQ ID NO: 9171 - RNA, 20 nt, Homo sapiens
  source 1..20: mol_type = unassigned RNA
tctggccgtcactttcctgc

SEQ ID NO: 9172 - RNA, 20 nt, Homo sapiens
  source 1..20: mol_type = unassigned RNA
tgctctgagcccctttcctc

SEQ ID NO: 9173 - RNA, 20 nt, Homo sapiens
  source 1..20: mol_type = unassigned RNA
gctgcagaagtgtcagctcc

SEQ ID NO: 9174 - RNA, 20 nt, Homo sapiens
  source 1..20: mol_type = unassigned RNA
tcagctccaggtccacgatg

SEQ ID NO: 9175 - RNA, 20 nt, Homo sapiens
  source 1..20: mol_type = unassigned RNA
gctccaggtccacgatgcgg

SEQ ID NO: 9176 - RNA, 20 nt, Homo sapiens
  source 1..20: mol_type = unassigned RNA
ggccctcatagccctgctcc

SEQ ID NO: 9177 - RNA, 20 nt, Homo sapiens
  source 1..20: mol_type = unassigned RNA
ctcatagccctgctccagga

SEQ ID NO: 9178 - RNA, 20 nt, Homo sapiens
  source 1..20: mol_type = unassigned RNA
gctccaggaaggccctcacc

SEQ ID NO: 9179 - RNA, 20 nt, Homo sapiens
  source 1..20: mol_type = unassigned RNA
ccaggaaggccctcacctgg

SEQ ID NO: 9180 - RNA, 20 nt, Homo sapiens
  source 1..20: mol_type = unassigned RNA
aggccctcacctggaggaag

SEQ ID NO: 9181 - RNA, 20 nt, Homo sapiens
  source 1..20: mol_type = unassigned RNA
aggaagtggagtgagtatca

SEQ ID NO: 9182 - RNA, 20 nt, Homo sapiens
  source 1..20: mol_type = unassigned RNA
ggaagtggagtgagtatcac

SEQ ID NO: 9183 - RNA, 20 nt, Homo sapiens
  source 1..20: mol_type = unassigned RNA
gcagccttgggtaggagtgg

SEQ ID NO: 9184 - RNA, 20 nt, Homo sapiens
  source 1..20: mol_type = unassigned RNA
tgcagccttgggtaggagtg

SEQ ID NO: 9185 - RNA, 20 nt, Homo sapiens
  source 1..20: mol_type = unassigned RNA
ctgcagccttgggtaggagt

SEQ ID NO: 9186 - RNA, 20 nt, Homo sapiens
  source 1..20: mol_type = unassigned RNA
tctgcagccttgggtaggag

SEQ ID NO: 9187 - RNA, 20 nt, Homo sapiens
  source 1..20: mol_type = unassigned RNA
acacttctgcagccttgggt

SEQ ID NO: 9188 - RNA, 20 nt, Homo sapiens
  source 1..20: mol_type = unassigned RNA
gctgacacttctgcagcctt

SEQ ID NO: 9189 - RNA, 20 nt, Homo sapiens
  source 1..20: mol_type = unassigned RNA
agctgacacttctgcagcct

SEQ ID NO: 9190 - RNA, 20 nt, Homo sapiens
  source 1..20: mol_type = unassigned RNA
gggcctccgcatcgtggacc

SEQ ID NO: 9191 - RNA, 20 nt, Homo sapiens
  source 1..20: mol_type = unassigned RNA
ctatgagggcctccgcatcg

SEQ ID NO: 9192 - RNA, 20 nt, Homo sapiens
  source 1..20: mol_type = unassigned RNA
ttcctggagcagggctatga

SEQ ID NO: 9193 - RNA, 20 nt, Homo sapiens
  source 1..20: mol_type = unassigned RNA
cttcctggagcagggctatg

SEQ ID NO: 9194 - RNA, 20 nt, Homo sapiens
  source 1..20: mol_type = unassigned RNA
gtgagggccttcctggagca

SEQ ID NO: 9195 - RNA, 20 nt, Homo sapiens
  source 1..20: mol_type = unassigned RNA
ggtgagggccttcctggagc

SEQ ID NO: 9196 - RNA, 20 nt, Homo sapiens
  source 1..20: mol_type = unassigned RNA
cctccaggtgagggccttcc

SEQ ID NO: 9197 - RNA, 20 nt, Homo sapiens
  source 1..20: mol_type = unassigned RNA
actccacttcctccaggtga

SEQ ID NO: 9198 - RNA, 20 nt, Homo sapiens
  source 1..20: mol_type = unassigned RNA
cactccacttcctccaggtg

SEQ ID NO: 9199 - RNA, 20 nt, Homo sapiens
  source 1..20: mol_type = unassigned RNA
atactcactccacttcctcc

SEQ ID NO: 9200 - RNA, 20 nt, Homo sapiens
  source 1..20: mol_type = unassigned RNA
gccccccgtctcagcctctc

SEQ ID NO: 9201 - RNA, 20 nt, Homo sapiens
  source 1..20: mol_type = unassigned RNA
ccccccgtctcagcctctca

SEQ ID NO: 9202 - RNA, 20 nt, Homo sapiens
  source 1..20: mol_type = unassigned RNA
cagcctctcagggaaccagc

SEQ ID NO: 9203 - RNA, 20 nt, Homo sapiens
  source 1..20: mol_type = unassigned RNA
gggaaccagctggaagatga

SEQ ID NO: 9204 - RNA, 20 nt, Homo sapiens
  source 1..20: mol_type = unassigned RNA
agctggaagatgaaggctgt

SEQ ID NO: 9205 - RNA, 20 nt, Homo sapiens
  source 1..20: mol_type = unassigned RNA
agatgaaggctgtcggctga

SEQ ID NO: 9206 - RNA, 20 nt, Homo sapiens
  source 1..20: mol_type = unassigned RNA
aggctgtcggctgatggcag

SEQ ID NO: 9207 - RNA, 20 nt, Homo sapiens
  source 1..20: mol_type = unassigned RNA
catcccagctgcacatcgcc

SEQ ID NO: 9208 - RNA, 20 nt, Homo sapiens
  source 1..20: mol_type = unassigned RNA
gctgcacatcgccaggaagc

SEQ ID NO: 9209 - RNA, 20 nt, Homo sapiens
  source 1..20: mol_type = unassigned RNA
ccctgagaggctgagacggg

SEQ ID NO: 9210 - RNA, 20 nt, Homo sapiens
  source 1..20: mol_type = unassigned RNA
tccctgagaggctgagacgg

SEQ ID NO: 9211 - RNA, 20 nt, Homo sapiens
  source 1..20: mol_type = unassigned RNA
ttccctgagaggctgagacg

SEQ ID NO: 9212 - RNA, 20 nt, Homo sapiens
  source 1..20: mol_type = unassigned RNA
gttccctgagaggctgagac

SEQ ID NO: 9213 - RNA, 20 nt, Homo sapiens
  source 1..20: mol_type = unassigned RNA
ggttccctgagaggctgaga

SEQ ID NO: 9214 - RNA, 20 nt, Homo sapiens
  source 1..20: mol_type = unassigned RNA
cttccagctggttccctgag

SEQ ID NO: 9215 - RNA, 20 nt, Homo sapiens
  source 1..20: mol_type = unassigned RNA
gacagccttcatcttccagc

SEQ ID NO: 9216 - RNA, 20 nt, Homo sapiens
  source 1..20: mol_type = unassigned RNA
cttcctggcgatgtgcagct

SEQ ID NO: 9217 - RNA, 20 nt, Homo sapiens
  source 1..20: mol_type = unassigned RNA
gcttcctggcgatgtgcagc

SEQ ID NO: 9218 - RNA, 20 nt, Homo sapiens
  source 1..20: mol_type = unassigned RNA
gacaactcactccagcttcc

SEQ ID NO: 9219 - RNA, 20 nt, Homo sapiens
  source 1..20: mol_type = unassigned RNA
ctccacagcctcagtaacaa

SEQ ID NO: 9220 - RNA, 20 nt, Homo sapiens
  source 1..20: mol_type = unassigned RNA
tccacagcctcagtaacaac

SEQ ID NO: 9221 - RNA, 20 nt, Homo sapiens
  source 1..20: mol_type = unassigned RNA
cagtaacaacgggctttctg

SEQ ID NO: 9222 - RNA, 20 nt, Homo sapiens
  source 1..20: mol_type = unassigned RNA
aacaacgggctttctgtggc

SEQ ID NO: 9223 - RNA, 20 nt, Homo sapiens
  source 1..20: mol_type = unassigned RNA
acaacgggctttctgtggcc

SEQ ID NO: 9224 - RNA, 20 nt, Homo sapiens
  source 1..20: mol_type = unassigned RNA
caacgggctttctgtggccg

SEQ ID NO: 9225 - RNA, 20 nt, Homo sapiens
  source 1..20: mol_type = unassigned RNA
ccggggtgcattgtgtgctg

SEQ ID NO: 9226 - RNA, 20 nt, Homo sapiens
  source 1..20: mol_type = unassigned RNA
cggggtgcattgtgtgctga

SEQ ID NO: 9227 - RNA, 20 nt, Homo sapiens
  source 1..20: mol_type = unassigned RNA
tgagggccgtgagtgcgtgc

SEQ ID NO: 9228 - RNA, 20 nt, Homo sapiens
  source 1..20: mol_type = unassigned RNA
cgtgagtgcgtgctggaccc

SEQ ID NO: 9229 - RNA, 20 nt, Homo sapiens
  source 1..20: mol_type = unassigned RNA
ccctggcagagctgcacatc

SEQ ID NO: 9230 - RNA, 20 nt, Homo sapiens
  source 1..20: mol_type = unassigned RNA
tggcagagctgcacatcagg

SEQ ID NO: 9231 - RNA, 20 nt, Homo sapiens
  source 1..20: mol_type = unassigned RNA
ggcagagctgcacatcaggt

SEQ ID NO: 9232 - RNA, 20 nt, Homo sapiens
  source 1..20: mol_type = unassigned RNA
aggctgtggagagcaggaga

SEQ ID NO: 9233 - RNA, 20 nt, Homo sapiens
  source 1..20: mol_type = unassigned RNA
ttactgaggctgtggagagc

SEQ ID NO: 9234 - RNA, 20 nt, Homo sapiens
  source 1..20: mol_type = unassigned RNA
gcccgttgttactgaggctg

SEQ ID NO: 9235 - RNA, 20 nt, Homo sapiens
  source 1..20: mol_type = unassigned RNA
cagaaagcccgttgttactg

SEQ ID NO: 9236 - RNA, 20 nt, Homo sapiens
  source 1..20: mol_type = unassigned RNA
cctcagcacacaatgcaccc

SEQ ID NO: 9237 - RNA, 20 nt, Homo sapiens
  source 1..20: mol_type = unassigned RNA
cagggtccagcacgcactca

SEQ ID NO: 9238 - RNA, 20 nt, Homo sapiens
  source 1..20: mol_type = unassigned RNA
cctgatgtgcagctctgcca

SEQ ID NO: 9239 - RNA, 20 nt, Homo sapiens
  source 1..20: mol_type = unassigned RNA
acctgatgtgcagctctgcc

SEQ ID NO: 9240 - RNA, 20 nt, Homo sapiens
  source 1..20: mol_type = unassigned RNA
tgtgatcttcatgtttgccc

SEQ ID NO: 9241 - RNA, 20 nt, Homo sapiens
  source 1..20: mol_type = unassigned RNA
catgtttgcccaggagccag

SEQ ID NO: 9242 - RNA, 20 nt, Homo sapiens
  source 1..20: mol_type = unassigned RNA
ccaggagccagaggagcaga

SEQ ID NO: 9243 - RNA, 20 nt, Homo sapiens
  source 1..20: mol_type = unassigned RNA
caggagccagaggagcagaa

SEQ ID NO: 9244 - RNA, 20 nt, Homo sapiens
  source 1..20: mol_type = unassigned RNA
aggagccagaggagcagaag

SEQ ID NO: 9245 - RNA, 20 nt, Homo sapiens
  source 1..20: mol_type = unassigned RNA
agaggagcagaaggggcccc

SEQ ID NO: 9246 - RNA, 20 nt, Homo sapiens
  source 1..20: mol_type = unassigned RNA
agcagaaggggccccaggag

SEQ ID NO: 9247 - RNA, 20 nt, Homo sapiens
  source 1..20: mol_type = unassigned RNA
gaaggggccccaggagaggt

SEQ ID NO: 9248 - RNA, 20 nt, Homo sapiens
  source 1..20: mol_type = unassigned RNA
aaggggccccaggagaggta

SEQ ID NO: 9249 - RNA, 20 nt, Homo sapiens
  source 1..20: mol_type = unassigned RNA
aggctgtgaagacaaaagag

SEQ ID NO: 9250 - RNA, 20 nt, Homo sapiens
  source 1..20: mol_type = unassigned RNA
caggctgtgaagacaaaaga

SEQ ID NO: 9251 - RNA, 20 nt, Homo sapiens
  source 1..20: mol_type = unassigned RNA
gcaggctgtgaagacaaaag

SEQ ID NO: 9252 - RNA, 20 nt, Homo sapiens
  source 1..20: mol_type = unassigned RNA
agatcacagttttgtgctgc

SEQ ID NO: 9253 - RNA, 20 nt, Homo sapiens
  source 1..20: mol_type = unassigned RNA
cttctgctcctctggctcct

SEQ ID NO: 9254 - RNA, 20 nt, Homo sapiens
  source 1..20: mol_type = unassigned RNA
ccttctgctcctctggctcc

SEQ ID NO: 9255 - RNA, 20 nt, Homo sapiens
  source 1..20: mol_type = unassigned RNA
tggggccccttctgctcctc

SEQ ID NO: 9256 - RNA, 20 nt, Homo sapiens
  source 1..20: mol_type = unassigned RNA
atcgggccctacctctcctg

SEQ ID NO: 9257 - RNA, 20 nt, Homo sapiens
  source 1..20: mol_type = unassigned RNA
aatcgggccctacctctcct

SEQ ID NO: 9258 - RNA, 20 nt, Homo sapiens
  source 1..20: mol_type = unassigned RNA
aaatcgggccctacctctcc

SEQ ID NO: 9259 - RNA, 20 nt, Homo sapiens
  source 1..20: mol_type = unassigned RNA
agctgcctctgagctcccga

SEQ ID NO: 9260 - RNA, 20 nt, Homo sapiens
  source 1..20: mol_type = unassigned RNA
ctctgagctcccgaaggatg

SEQ ID NO: 9261 - RNA, 20 nt, Homo sapiens
  source 1..20: mol_type = unassigned RNA
cgaaggatgaggtacagtga

SEQ ID NO: 9262 - RNA, 20 nt, Homo sapiens
  source 1..20: mol_type = unassigned RNA
gccctggagggacatcacca

SEQ ID NO: 9263 - RNA, 20 nt, Homo sapiens
  source 1..20: mol_type = unassigned RNA
tcaagaaatgcagccctgga

SEQ ID NO: 9264 - RNA, 20 nt, Homo sapiens
  source 1..20: mol_type = unassigned RNA
gtcaagaaatgcagccctgg

SEQ ID NO: 9265 - RNA, 20 nt, Homo sapiens
  source 1..20: mol_type = unassigned RNA
gctgtcaagaaatgcagccc

SEQ ID NO: 9266 - RNA, 20 nt, Homo sapiens
  source 1..20: mol_type = unassigned RNA
cagagggcatctggagcatg

SEQ ID NO: 9267 - RNA, 20 nt, Homo sapiens
  source 1..20: mol_type = unassigned RNA
gaggcagctcagagggcatc

SEQ ID NO: 9268 - RNA, 20 nt, Homo sapiens
  source 1..20: mol_type = unassigned RNA
gagctcagaggcagctcaga

SEQ ID NO: 9269 - RNA, 20 nt, Homo sapiens
  source 1..20: mol_type = unassigned RNA
ggagctcagaggcagctcag

SEQ ID NO: 9270 - RNA, 20 nt, Homo sapiens
  source 1..20: mol_type = unassigned RNA
ctcatccttcgggagctcag

SEQ ID NO: 9271 - RNA, 20 nt, Homo sapiens
  source 1..20: mol_type = unassigned RNA
atcactgtacctcatccttc

SEQ ID NO: 9272 - RNA, 20 nt, Homo sapiens
  source 1..20: mol_type = unassigned RNA
catcactgtacctcatcctt

SEQ ID NO: 9273 - RNA, 20 nt, Homo sapiens
  source 1..20: mol_type = unassigned RNA
ctgggcaggctgacacattg

SEQ ID NO: 9274 - RNA, 20 nt, Homo sapiens
  source 1..20: mol_type = unassigned RNA
gcacctagagcagctctgca

SEQ ID NO: 9275 - RNA, 20 nt, Homo sapiens
  source 1..20: mol_type = unassigned RNA
agagcagctctgcaaggctc

SEQ ID NO: 9276 - RNA, 20 nt, Homo sapiens
  source 1..20: mol_type = unassigned RNA
gagcagctctgcaaggctct

SEQ ID NO: 9277 - RNA, 20 nt, Homo sapiens
  source 1..20: mol_type = unassigned RNA
cagctctgcaaggctctggg

SEQ ID NO: 9278 - RNA, 20 nt, Homo sapiens
  source 1..20: mol_type = unassigned RNA
ctgggaggaagctgccacct

SEQ ID NO: 9279 - RNA, 20 nt, Homo sapiens
  source 1..20: mol_type = unassigned RNA
tcacctccacctcgagtgag

SEQ ID NO: 9280 - RNA, 20 nt, Homo sapiens
  source 1..20: mol_type = unassigned RNA
cgagtgagtggtttgtgtgt

SEQ ID NO: 9281 - RNA, 20 nt, Homo sapiens
  source 1..20: mol_type = unassigned RNA
acaatgtgtcagcctgccca

SEQ ID NO: 9282 - RNA, 20 nt, Homo sapiens
  source 1..20: mol_type = unassigned RNA
cacaatgtgtcagcctgccc

SEQ ID NO: 9283 - RNA, 20 nt, Homo sapiens
  source 1..20: mol_type = unassigned RNA
gctctaggtgcttttcttgg

SEQ ID NO: 9284 - RNA, 20 nt, Homo sapiens
  source 1..20: mol_type = unassigned RNA
gctgctctaggtgcttttct

SEQ ID NO: 9285 - RNA, 20 nt, Homo sapiens
  source 1..20: mol_type = unassigned RNA
gagccttgcagagctgctct

SEQ ID NO: 9286 - RNA, 20 nt, Homo sapiens
  source 1..20: mol_type = unassigned RNA
cgaggtggaggtgaccgagg

SEQ ID NO: 9287 - RNA, 20 nt, Homo sapiens
  source 1..20: mol_type = unassigned RNA
actcgaggtggaggtgaccg

SEQ ID NO: 9288 - RNA, 20 nt, Homo sapiens
  source 1..20: mol_type = unassigned RNA
aaaccactcactcgaggtgg

SEQ ID NO: 9289 - RNA, 20 nt, Homo sapiens
  source 1..20: mol_type = unassigned RNA
cacaaaccactcactcgagg

SEQ ID NO: 9290 - RNA, 20 nt, Homo sapiens
  source 1..20: mol_type = unassigned RNA
acacacaaaccactcactcg

SEQ ID NO: 9291 - RNA, 20 nt, Homo sapiens
  source 1..20: mol_type = unassigned RNA
ctccccacccccagcttctc

SEQ ID NO: 9292 - RNA, 20 nt, Homo sapiens
  source 1..20: mol_type = unassigned RNA
cagcttctcaggcaatgctc

SEQ ID NO: 9293 - RNA, 20 nt, Homo sapiens
  source 1..20: mol_type = unassigned RNA
agcttctcaggcaatgctct

SEQ ID NO: 9294 - RNA, 20 nt, Homo sapiens
  source 1..20: mol_type = unassigned RNA
gcttctcaggcaatgctctg

SEQ ID NO: 9295 - RNA, 20 nt, Homo sapiens
  source 1..20: mol_type = unassigned RNA
cttctcaggcaatgctctgg

SEQ ID NO: 9296 - RNA, 20 nt, Homo sapiens
  source 1..20: mol_type = unassigned RNA
ggcaatgctctgggggatga

SEQ ID NO: 9297 - RNA, 20 nt, Homo sapiens
  source 1..20: mol_type = unassigned RNA
tgggggatgaaggtgcagcc

SEQ ID NO: 9298 - RNA, 20 nt, Homo sapiens
  source 1..20: mol_type = unassigned RNA
ggatgaaggtgcagcccggc

SEQ ID NO: 9299 - RNA, 20 nt, Homo sapiens
  source 1..20: mol_type = unassigned RNA
cggctggctcagctgctccc

SEQ ID NO: 9300 - RNA, 20 nt, Homo sapiens
  source 1..20: mol_type = unassigned RNA
ggctggctcagctgctccca

SEQ ID NO: 9301 - RNA, 20 nt, Homo sapiens
  source 1..20: mol_type = unassigned RNA
ggctcagctgctcccagggc

SEQ ID NO: 9302 - RNA, 20 nt, Homo sapiens
  source 1..20: mol_type = unassigned RNA
gctcagctgctcccagggct

SEQ ID NO: 9303 - RNA, 20 nt, Homo sapiens
  source 1..20: mol_type = unassigned RNA
cttgaagtgagtagcccgct

SEQ ID NO: 9304 - RNA, 20 nt, Homo sapiens
  source 1..20: mol_type = unassigned RNA
gaagctgggggtggggagaa

SEQ ID NO: 9305 - RNA, 20 nt, Homo sapiens
  source 1..20: mol_type = unassigned RNA
agaagctgggggtggggaga

SEQ ID NO: 9306 - RNA, 20 nt, Homo sapiens
  source 1..20: mol_type = unassigned RNA
tgcctgagaagctgggggtg

SEQ ID NO: 9307 - RNA, 20 nt, Homo sapiens
  source 1..20: mol_type = unassigned RNA
ttgcctgagaagctgggggt

SEQ ID NO: 9308 - RNA, 20 nt, Homo sapiens
  source 1..20: mol_type = unassigned RNA
attgcctgagaagctggggg

SEQ ID NO: 9309 - RNA, 20 nt, Homo sapiens
  source 1..20: mol_type = unassigned RNA
agcattgcctgagaagctgg

SEQ ID NO: 9310 - RNA, 20 nt, Homo sapiens
  source 1..20: mol_type = unassigned RNA
gagcattgcctgagaagctg

SEQ ID NO: 9311 - RNA, 20 nt, Homo sapiens
  source 1..20: mol_type = unassigned RNA
agagcattgcctgagaagct

SEQ ID NO: 9312 - RNA, 20 nt, Homo sapiens
  source 1..20: mol_type = unassigned RNA
cagagcattgcctgagaagc

SEQ ID NO: 9313 - RNA, 20 nt, Homo sapiens
  source 1..20: mol_type = unassigned RNA
tgggagcagctgagccagcc

SEQ ID NO: 9314 - RNA, 20 nt, Homo sapiens
  source 1..20: mol_type = unassigned RNA
ctgggagcagctgagccagc

SEQ ID NO: 9315 - RNA, 20 nt, Homo sapiens
  source 1..20: mol_type = unassigned RNA
actgcagagctcccagccct

SEQ ID NO: 9316 - RNA, 20 nt, Homo sapiens
  source 1..20: mol_type = unassigned RNA
gactgcagagctcccagccc

SEQ ID NO: 9317 - RNA, 20 nt, Homo sapiens
  source 1..20: mol_type = unassigned RNA
ctagcgggctactcacttca

SEQ ID NO: 9318 - RNA, 20 nt, Homo sapiens
  source 1..20: mol_type = unassigned RNA
atctccagcctcagtgagaa

SEQ ID NO: 9319 - RNA, 20 nt, Homo sapiens
  source 1..20: mol_type = unassigned RNA
cagtgagaacggtttgtccc

SEQ ID NO: 9320 - RNA, 20 nt, Homo sapiens
  source 1..20: mol_type = unassigned RNA
tttgtccctggatgccgtgt

SEQ ID NO: 9321 - RNA, 20 nt, Homo sapiens
  source 1..20: mol_type = unassigned RNA
ttgtccctggatgccgtgtt

SEQ ID NO: 9322 - RNA, 20 nt, Homo sapiens
  source 1..20: mol_type = unassigned RNA
cctggatgccgtgttgggtt

SEQ ID NO: 9323 - RNA, 20 nt, Homo sapiens
  source 1..20: mol_type = unassigned RNA
atgccgtgttgggtttggtt

SEQ ID NO: 9324 - RNA, 20 nt, Homo sapiens
  source 1..20: mol_type = unassigned RNA
ggtgcttctccactctgcag

SEQ ID NO: 9325 - RNA, 20 nt, Homo sapiens
  source 1..20: mol_type = unassigned RNA
tctgcagtggctcttccgct

SEQ ID NO: 9326 - RNA, 20 nt, Homo sapiens
  source 1..20: mol_type = unassigned RNA
ggctcttccgcttggacatc

SEQ ID NO: 9327 - RNA, 20 nt, Homo sapiens
  source 1..20: mol_type = unassigned RNA
gaggctggagatcacagggg

SEQ ID NO: 9328 - RNA, 20 nt, Homo sapiens
  source 1..20: mol_type = unassigned RNA
actgaggctggagatcacag

SEQ ID NO: 9329 - RNA, 20 nt, Homo sapiens
  source 1..20: mol_type = unassigned RNA
cactgaggctggagatcaca

SEQ ID NO: 9330 - RNA, 20 nt, Homo sapiens
  source 1..20: mol_type = unassigned RNA
tcactgaggctggagatcac

SEQ ID NO: 9331 - RNA, 20 nt, Homo sapiens
  source 1..20: mol_type = unassigned RNA
caaaccgttctcactgaggc

SEQ ID NO: 9332 - RNA, 20 nt, Homo sapiens
  source 1..20: mol_type = unassigned RNA
gggacaaaccgttctcactg

SEQ ID NO: 9333 - RNA, 20 nt, Homo sapiens
  source 1..20: mol_type = unassigned RNA
caaacccaacacggcatcca

SEQ ID NO: 9334 - RNA, 20 nt, Homo sapiens
  source 1..20: mol_type = unassigned RNA
ccaaacccaacacggcatcc

SEQ ID NO: 9335 - RNA, 20 nt, Homo sapiens
  source 1..20: mol_type = unassigned RNA
gcaccgaaccaaacccaaca

SEQ ID NO: 9336 - RNA, 20 nt, Homo sapiens
  source 1..20: mol_type = unassigned RNA
gcggaagagccactgcagag

SEQ ID NO: 9337 - RNA, 20 nt, Homo sapiens
  source 1..20: mol_type = unassigned RNA
acgctcacctgatgtccaag

SEQ ID NO: 9338 - RNA, 20 nt, Homo sapiens
  source 1..20: mol_type = unassigned RNA
agccaacacatcctcctgag

SEQ ID NO: 9339 - RNA, 20 nt, Homo sapiens
  source 1..20: mol_type = unassigned RNA
gccaacacatcctcctgaga

SEQ ID NO: 9340 - RNA, 20 nt, Homo sapiens
  source 1..20: mol_type = unassigned RNA
ccaacacatcctcctgagag

SEQ ID NO: 9341 - RNA, 20 nt, Homo sapiens
  source 1..20: mol_type = unassigned RNA
tgagaggggacaagacaagc

SEQ ID NO: 9342 - RNA, 20 nt, Homo sapiens
  source 1..20: mol_type = unassigned RNA
ggggacaagacaagcaggtg

SEQ ID NO: 9343 - RNA, 20 nt, Homo sapiens
  source 1..20: mol_type = unassigned RNA
gacaagacaagcaggtgagg

SEQ ID NO: 9344 - RNA, 20 nt, Homo sapiens
  source 1..20: mol_type = unassigned RNA
acaagacaagcaggtgagga

SEQ ID NO: 9345 - RNA, 20 nt, Homo sapiens
  source 1..20: mol_type = unassigned RNA
gcaggtgaggagggaacgct

SEQ ID NO: 9346 - RNA, 20 nt, Homo sapiens
  source 1..20: mol_type = unassigned RNA
caggtgaggagggaacgctc

SEQ ID NO: 9347 - RNA, 20 nt, Homo sapiens
  source 1..20: mol_type = unassigned RNA
tttcaaagctggaagcagag

SEQ ID NO: 9348 - RNA, 20 nt, Homo sapiens
  source 1..20: mol_type = unassigned RNA
gatgtgttggctttcaaagc

SEQ ID NO: 9349 - RNA, 20 nt, Homo sapiens
  source 1..20: mol_type = unassigned RNA
cccctctcaggaggatgtgt

SEQ ID NO: 9350 - RNA, 20 nt, Homo sapiens
  source 1..20: mol_type = unassigned RNA
ttgtcttgtcccctctcagg

SEQ ID NO: 9351 - RNA, 20 nt, Homo sapiens
  source 1..20: mol_type = unassigned RNA
tgcttgtcttgtcccctctc

SEQ ID NO: 9352 - RNA, 20 nt, Homo sapiens
  source 1..20: mol_type = unassigned RNA
atccccctcctagggatatg

SEQ ID NO: 9353 - RNA, 20 nt, Homo sapiens
  source 1..20: mol_type = unassigned RNA
tccccctcctagggatatgt

SEQ ID NO: 9354 - RNA, 20 nt, Homo sapiens
  source 1..20: mol_type = unassigned RNA
cctagggatatgtgggccac

SEQ ID NO: 9355 - RNA, 20 nt, Homo sapiens
  source 1..20: mol_type = unassigned RNA
ccagctgcagccaagttctt

SEQ ID NO: 9356 - RNA, 20 nt, Homo sapiens
  source 1..20: mol_type = unassigned RNA
cagctgcagccaagttctta

SEQ ID NO: 9357 - RNA, 20 nt, Homo sapiens
  source 1..20: mol_type = unassigned RNA
tccgtcagcgctgcatcccc

SEQ ID NO: 9358 - RNA, 20 nt, Homo sapiens
  source 1..20: mol_type = unassigned RNA
gctgcatccccaggagcctc

SEQ ID NO: 9359 - RNA, 20 nt, Homo sapiens
  source 1..20: mol_type = unassigned RNA
gcccacatatccctaggagg

SEQ ID NO: 9360 - RNA, 20 nt, Homo sapiens
  source 1..20: mol_type = unassigned RNA
ggcccacatatccctaggag

SEQ ID NO: 9361 - RNA, 20 nt, Homo sapiens
  source 1..20: mol_type = unassigned RNA
tggcccacatatccctagga

SEQ ID NO: 9362 - RNA, 20 nt, Homo sapiens
  source 1..20: mol_type = unassigned RNA
gtggcccacatatccctagg

SEQ ID NO: 9363 - RNA, 20 nt, Homo sapiens
  source 1..20: mol_type = unassigned RNA
ccagtggcccacatatccct

SEQ ID NO: 9364 - RNA, 20 nt, Homo sapiens
  source 1..20: mol_type = unassigned RNA
gaagtctggcaaagatccag

SEQ ID NO: 9365 - RNA, 20 nt, Homo sapiens
  source 1..20: mol_type = unassigned RNA
ttggctgcagctgggaagtc

SEQ ID NO: 9366 - RNA, 20 nt, Homo sapiens
  source 1..20: mol_type = unassigned RNA
ctaagaacttggctgcagct

SEQ ID NO: 9367 - RNA, 20 nt, Homo sapiens
  source 1..20: mol_type = unassigned RNA
cctaagaacttggctgcagc

SEQ ID NO: 9368 - RNA, 20 nt, Homo sapiens
  source 1..20: mol_type = unassigned RNA
ctgacggaaccctaagaact

SEQ ID NO: 9369 - RNA, 20 nt, Homo sapiens
  source 1..20: mol_type = unassigned RNA
tcctggggatgcagcgctga

SEQ ID NO: 9370 - RNA, 20 nt, Homo sapiens
  source 1..20: mol_type = unassigned RNA
gacagtaccagaggctcctg

SEQ ID NO: 9371 - RNA, 20 nt, Homo sapiens
  source 1..20: mol_type = unassigned RNA
ggacagtaccagaggctcct

SEQ ID NO: 9372 - RNA, 20 nt, Homo sapiens
  source 1..20: mol_type = unassigned RNA
gggacagtaccagaggctcc

SEQ ID NO: 9373 - RNA, 20 nt, Homo sapiens
  source 1..20: mol_type = unassigned RNA
aagggctgggacagtaccag

SEQ ID NO: 9374 - RNA, 20 nt, Homo sapiens
  source 1..20: mol_type = unassigned RNA
cagcctcagtgagtgtcctc

SEQ ID NO: 9375 - RNA, 20 nt, Homo sapiens
  source 1..20: mol_type = unassigned RNA
ccgcctctgtgccactctga

SEQ ID NO: 9376 - RNA, 20 nt, Homo sapiens
  source 1..20: mol_type = unassigned RNA
tgccactctgaaggactgcc

SEQ ID NO: 9377 - RNA, 20 nt, Homo sapiens
  source 1..20: mol_type = unassigned RNA
gccactctgaaggactgccc

SEQ ID NO: 9378 - RNA, 20 nt, Homo sapiens
  source 1..20: mol_type = unassigned RNA
gaaggactgcccgggacccc

SEQ ID NO: 9379 - RNA, 20 nt, Homo sapiens
  source 1..20: mol_type = unassigned RNA
tggaactgcagtaagtaacg

SEQ ID NO: 9380 - RNA, 20 nt, Homo sapiens
  source 1..20: mol_type = unassigned RNA
tgaggctgcaaaggggcaat

SEQ ID NO: 9381 - RNA, 20 nt, Homo sapiens
  source 1..20: mol_type = unassigned RNA
ctgaggctgcaaaggggcaa

SEQ ID NO: 9382 - RNA, 20 nt, Homo sapiens
  source 1..20: mol_type = unassigned RNA
cactcactgaggctgcaaag

SEQ ID NO: 9383 - RNA, 20 nt, Homo sapiens
  source 1..20: mol_type = unassigned RNA
acactcactgaggctgcaaa

SEQ ID NO: 9384 - RNA, 20 nt, Homo sapiens
  source 1..20: mol_type = unassigned RNA
gacactcactgaggctgcaa

SEQ ID NO: 9385 - RNA, 20 nt, Homo sapiens
  source 1..20: mol_type = unassigned RNA
gctccagaggacactcactg

SEQ ID NO: 9386 - RNA, 20 nt, Homo sapiens
  source 1..20: mol_type = unassigned RNA
gtgaggcttgggggctccag

SEQ ID NO: 9387 - RNA, 20 nt, Homo sapiens
  source 1..20: mol_type = unassigned RNA
cagaggcgggtgaggcttgg

SEQ ID NO: 9388 - RNA, 20 nt, Homo sapiens
  source 1..20: mol_type = unassigned RNA
acagaggcgggtgaggcttg

SEQ ID NO: 9389 - RNA, 20 nt, Homo sapiens
  source 1..20: mol_type = unassigned RNA
cacagaggcgggtgaggctt

SEQ ID NO: 9390 - RNA, 20 nt, Homo sapiens
  source 1..20: mol_type = unassigned RNA
gcacagaggcgggtgaggct

SEQ ID NO: 9391 - RNA, 20 nt, Homo sapiens
  source 1..20: mol_type = unassigned RNA
gagtggcacagaggcgggtg

SEQ ID NO: 9392 - RNA, 20 nt, Homo sapiens
  source 1..20: mol_type = unassigned RNA
cttcagagtggcacagaggc

SEQ ID NO: 9393 - RNA, 20 nt, Homo sapiens
  source 1..20: mol_type = unassigned RNA
ccttcagagtggcacagagg

SEQ ID NO: 9394 - RNA, 20 nt, Homo sapiens
  source 1..20: mol_type = unassigned RNA
agtccttcagagtggcacag

SEQ ID NO: 9395 - RNA, 20 nt, Homo sapiens
  source 1..20: mol_type = unassigned RNA
tcccgggcagtccttcagag

SEQ ID NO: 9396 - RNA, 20 nt, Homo sapiens
  source 1..20: mol_type = unassigned RNA
actgcagttccaggggtccc

SEQ ID NO: 9397 - RNA, 20 nt, Homo sapiens
  source 1..20: mol_type = unassigned RNA
tactgcagttccaggggtcc

SEQ ID NO: 9398 - RNA, 20 nt, Homo sapiens
  source 1..20: mol_type = unassigned RNA
gttacttactgcagttccag

SEQ ID NO: 9399 - RNA, 20 nt, Homo sapiens
  source 1..20: mol_type = unassigned RNA
cgttacttactgcagttcca

SEQ ID NO: 9400 - RNA, 20 nt, Homo sapiens
  source 1..20: mol_type = unassigned RNA
tcgttacttactgcagttcc

SEQ ID NO: 9401 - RNA, 20 nt, Homo sapiens
  source 1..20: mol_type = unassigned RNA
gttcctgagtgaccagagcc

SEQ ID NO: 9402 - RNA, 20 nt, Homo sapiens
  source 1..20: mol_type = unassigned RNA
ccagagcctggagactctac

SEQ ID NO: 9403 - RNA, 20 nt, Homo sapiens
  source 1..20: mol_type = unassigned RNA
aatctgtgaaacaaagcagg

SEQ ID NO: 9404 - RNA, 20 nt, Homo sapiens
  source 1..20: mol_type = unassigned RNA
gacaatctgtgaaacaaagc

SEQ ID NO: 9405 - RNA, 20 nt, Homo sapiens
  source 1..20: mol_type = unassigned RNA
ctggtcactcaggaactcac

SEQ ID NO: 9406 - RNA, 20 nt, Homo sapiens
  source 1..20: mol_type = unassigned RNA
tctccaggctctggtcactc

SEQ ID NO: 9407 - RNA, 20 nt, Homo sapiens
  source 1..20: mol_type = unassigned RNA
ccagtagagtctccaggctc

SEQ ID NO: 9408 - RNA, 20 nt, Homo sapiens
  source 1..20: mol_type = unassigned RNA
agcagtccagtagagtctcc

SEQ ID NO: 9409 - RNA, 20 nt, Homo sapiens
  source 1..20: mol_type = unassigned RNA
aggctcagctgagggagttg

SEQ ID NO: 9410 - RNA, 20 nt, Homo sapiens
  source 1..20: mol_type = unassigned RNA
actgcagcaggctcagctga

SEQ ID NO: 9411 - RNA, 20 nt, Homo sapiens
  source 1..20: mol_type = unassigned RNA
tactgcagcaggctcagctg

SEQ ID NO: 9412 - RNA, 20 nt, Homo sapiens
  source 1..20: mol_type = unassigned RNA
aactctcgtcttactgcagc

SEQ ID NO: 9413 - RNA, 20 nt, Homo sapiens
  source 1..20: mol_type = unassigned RNA
ccttttcaggctgagccaga

SEQ ID NO: 9414 - RNA, 20 nt, Homo sapiens
  source 1..20: mol_type = unassigned RNA
cttttcaggctgagccagac

SEQ ID NO: 9415 - RNA, 20 nt, Homo sapiens
  source 1..20: mol_type = unassigned RNA
cccgaaaagccccttcctgc

SEQ ID NO: 9416 - RNA, 20 nt, Homo sapiens
  source 1..20: mol_type = unassigned RNA
acaccttaagcctgtgtcca

SEQ ID NO: 9417 - RNA, 20 nt, Homo sapiens
  source 1..20: mol_type = unassigned RNA
caccttaagcctgtgtccac

SEQ ID NO: 9418 - RNA, 20 nt, Homo sapiens
  source 1..20: mol_type = unassigned RNA
cctgtgtccacgggttaaaa

SEQ ID NO: 9419 - RNA, 20 nt, Homo sapiens
  source 1..20: mol_type = unassigned RNA
gtgtccacgggttaaaaagg

SEQ ID NO: 9420 - RNA, 20 nt, Homo sapiens
  source 1..20: mol_type = unassigned RNA
gggttaaaaaggtggatctc

SEQ ID NO: 9421 - RNA, 20 nt, Homo sapiens
  source 1..20: mol_type = unassigned RNA
ttaaaaaggtggatctcagg

SEQ ID NO: 9422 - RNA, 20 nt, Homo sapiens
  source 1..20: mol_type = unassigned RNA
taaaaaggtggatctcaggt

SEQ ID NO: 9423 - RNA, 20 nt, Homo sapiens
  source 1..20: mol_type = unassigned RNA
atctcaggtgggcattcccc

SEQ ID NO: 9424 - RNA, 20 nt, Homo sapiens
  source 1..20: mol_type = unassigned RNA
tctcaggtgggcattcccct

SEQ ID NO: 9425 - RNA, 20 nt, Homo sapiens
  source 1..20: mol_type = unassigned RNA
ctcagcctgaaaaggaaagg

SEQ ID NO: 9426 - RNA, 20 nt, Homo sapiens
  source 1..20: mol_type = unassigned RNA
gctcagcctgaaaaggaaag

SEQ ID NO: 9427 - RNA, 20 nt, Homo sapiens
  source 1..20: mol_type = unassigned RNA
ggctcagcctgaaaaggaaa

SEQ ID NO: 9428 - RNA, 20 nt, Homo sapiens
  source 1..20: mol_type = unassigned RNA
tggctcagcctgaaaaggaa

SEQ ID NO: 9429 - RNA, 20 nt, Homo sapiens
  source 1..20: mol_type = unassigned RNA
ccgtctggctcagcctgaaa

SEQ ID NO: 9430 - RNA, 20 nt, Homo sapiens
  source 1..20: mol_type = unassigned RNA
ttttcggggacagtcccgtc

SEQ ID NO: 9431 - RNA, 20 nt, Homo sapiens
  source 1..20: mol_type = unassigned RNA
cagcaggaaggggcttttcg

SEQ ID NO: 9432 - RNA, 20 nt, Homo sapiens
  source 1..20: mol_type = unassigned RNA
ccagcaggaaggggcttttc

SEQ ID NO: 9433 - RNA, 20 nt, Homo sapiens
  source 1..20: mol_type = unassigned RNA
gccagcaggaaggggctttt

SEQ ID NO: 9434 - RNA, 20 nt, Homo sapiens
  source 1..20: mol_type = unassigned RNA
aggtgttggccagcaggaag

SEQ ID NO: 9435 - RNA, 20 nt, Homo sapiens
  source 1..20: mol_type = unassigned RNA
aaggtgttggccagcaggaa

SEQ ID NO: 9436 - RNA, 20 nt, Homo sapiens
  source 1..20: mol_type = unassigned RNA
taaggtgttggccagcagga

SEQ ID NO: 9437 - RNA, 20 nt, Homo sapiens
  source 1..20: mol_type = unassigned RNA
ggcttaaggtgttggccagc

SEQ ID NO: 9438 - RNA, 20 nt, Homo sapiens
  source 1..20: mol_type = unassigned RNA
tggacacaggcttaaggtgt

SEQ ID NO: 9439 - RNA, 20 nt, Homo sapiens
  source 1..20: mol_type = unassigned RNA
aacccgtggacacaggctta

SEQ ID NO: 9440 - RNA, 20 nt, Homo sapiens
  source 1..20: mol_type = unassigned RNA
cctttttaacccgtggacac

SEQ ID NO: 9441 - RNA, 20 nt, Homo sapiens
  source 1..20: mol_type = unassigned RNA
agatccacctttttaacccg

SEQ ID NO: 9442 - RNA, 20 nt, Homo sapiens
  source 1..20: mol_type = unassigned RNA
tttgcacttcagatccaacg

SEQ ID NO: 9443 - RNA, 20 nt, Homo sapiens
  source 1..20: mol_type = unassigned RNA
gcacttcagatccaacgagg

SEQ ID NO: 9444 - RNA, 20 nt, Homo sapiens
  source 1..20: mol_type = unassigned RNA
cttcagatccaacgaggagg

SEQ ID NO: 9445 - RNA, 20 nt, Homo sapiens
  source 1..20: mol_type = unassigned RNA
agatccaacgaggaggagga

SEQ ID NO: 9446 - RNA, 20 nt, Homo sapiens
  source 1..20: mol_type = unassigned RNA
gaggaggaaggcgtgtgctg

SEQ ID NO: 9447 - RNA, 20 nt, Homo sapiens
  source 1..20: mol_type = unassigned RNA
aggaggaaggcgtgtgctgt

SEQ ID NO: 9448 - RNA, 20 nt, Homo sapiens
  source 1..20: mol_type = unassigned RNA
gacctggatcagacaggacc

SEQ ID NO: 9449 - RNA, 20 nt, Homo sapiens
  source 1..20: mol_type = unassigned RNA
tgcagggacctggatcagac

SEQ ID NO: 9450 - RNA, 20 nt, Homo sapiens
  source 1..20: mol_type = unassigned RNA
agttgcatggtgcagggacc

SEQ ID NO: 9451 - RNA, 20 nt, Homo sapiens
  source 1..20: mol_type = unassigned RNA
gtgcaaagttgcatggtgca

SEQ ID NO: 9452 - RNA, 20 nt, Homo sapiens
  source 1..20: mol_type = unassigned RNA
agtgcaaagttgcatggtgc

SEQ ID NO: 9453 - RNA, 20 nt, Homo sapiens
  source 1..20: mol_type = unassigned RNA
atctgaagtgcaaagttgca

SEQ ID NO: 9454 - RNA, 20 nt, Homo sapiens
  source 1..20: mol_type = unassigned RNA
cacgccttcctcctcctcgt

SEQ ID NO: 9455 - RNA, 20 nt, Homo sapiens
  source 1..20: mol_type = unassigned RNA
cccctttacctccgtccagc

SEQ ID NO: 9456 - RNA, 20 nt, Homo sapiens
  source 1..20: mol_type = unassigned RNA
cctccgtccagcaggttcac

SEQ ID NO: 9457 - RNA, 20 nt, Homo sapiens
  source 1..20: mol_type = unassigned RNA
cacaggctgcagcctcagcc

SEQ ID NO: 9458 - RNA, 20 nt, Homo sapiens
  source 1..20: mol_type = unassigned RNA
agcacgtagagtcactctgc

SEQ ID NO: 9459 - RNA, 20 nt, Homo sapiens
  source 1..20: mol_type = unassigned RNA
cctgctggacggaggtaaag

SEQ ID NO: 9460 - RNA, 20 nt, Homo sapiens
  source 1..20: mol_type = unassigned RNA
acctgctggacggaggtaaa

SEQ ID NO: 9461 - RNA, 20 nt, Homo sapiens
  source 1..20: mol_type = unassigned RNA
aacctgctggacggaggtaa

SEQ ID NO: 9462 - RNA, 20 nt, Homo sapiens
  source 1..20: mol_type = unassigned RNA
cctgtgaacctgctggacgg

SEQ ID NO: 9463 - RNA, 20 nt, Homo sapiens
  source 1..20: mol_type = unassigned RNA
cagcctgtgaacctgctgga

SEQ ID NO: 9464 - RNA, 20 nt, Homo sapiens
  source 1..20: mol_type = unassigned RNA
gctgcagcctgtgaacctgc

SEQ ID NO: 9465 - RNA, 20 nt, Homo sapiens
  source 1..20: mol_type = unassigned RNA
actctacgtgctcctggctg

SEQ ID NO: 9466 - RNA, 20 nt, Homo sapiens
  source 1..20: mol_type = unassigned RNA
agagtgactctacgtgctcc

SEQ ID NO: 9467 - RNA, 20 nt, Homo sapiens
  source 1..20: mol_type = unassigned RNA
gttgaatgaggtggaggctg

SEQ ID NO: 9468 - RNA, 20 nt, Homo sapiens
  source 1..20: mol_type = unassigned RNA
gagggagttgaatgaggtgg

SEQ ID NO: 9469 - RNA, 20 nt, Homo sapiens
  source 1..20: mol_type = unassigned RNA
cagtctctcagcaaacctgc

SEQ ID NO: 9470 - RNA, 20 nt, Homo sapiens
  source 1..20: mol_type = unassigned RNA
agtctctcagcaaacctgct

SEQ ID NO: 9471 - RNA, 20 nt, Homo sapiens
  source 1..20: mol_type = unassigned RNA
gcaaacctgctgggcgacag

SEQ ID NO: 9472 - RNA, 20 nt, Homo sapiens
  source 1..20: mol_type = unassigned RNA
cagcggactcagatgccttc

SEQ ID NO: 9473 - RNA, 20 nt, Homo sapiens
  source 1..20: mol_type = unassigned RNA
ccttctggaatgtctgccgc

SEQ ID NO: 9474 - RNA, 20 nt, Homo sapiens
  source 1..20: mol_type = unassigned RNA
ctgccgcaggtgcccatctc

SEQ ID NO: 9475 - RNA, 20 nt, Homo sapiens
  source 1..20: mol_type = unassigned RNA
ctccggtttgcttgagtaag

SEQ ID NO: 9476 - RNA, 20 nt, Homo sapiens
  source 1..20: mol_type = unassigned RNA
ctgagagactgtagggggta

SEQ ID NO: 9477 - RNA, 20 nt, Homo sapiens
  source 1..20: mol_type = unassigned RNA
gtttgctgagagactgtagg

SEQ ID NO: 9478 - RNA, 20 nt, Homo sapiens
  source 1..20: mol_type = unassigned RNA
ggtttgctgagagactgtag

SEQ ID NO: 9479 - RNA, 20 nt, Homo sapiens
  source 1..20: mol_type = unassigned RNA
aggtttgctgagagactgta

SEQ ID NO: 9480 - RNA, 20 nt, Homo sapiens
  source 1..20: mol_type = unassigned RNA
caggtttgctgagagactgt

SEQ ID NO: 9481 - RNA, 20 nt, Homo sapiens
  source 1..20: mol_type = unassigned RNA
tgagtccgctgtcgcccagc

SEQ ID NO: 9482 - RNA, 20 nt, Homo sapiens
  source 1..20: mol_type = unassigned RNA
cctgcggcagacattccaga

SEQ ID NO: 9483 - RNA, 20 nt, Homo sapiens
  source 1..20: mol_type = unassigned RNA
aaaccggagatgggcacctg

SEQ ID NO: 9484 - RNA, 20 nt, Homo sapiens
  source 1..20: mol_type = unassigned RNA
tactcaagcaaaccggagat

SEQ ID NO: 9485 - RNA, 20 nt, Homo sapiens
  source 1..20: mol_type = unassigned RNA
ttactcaagcaaaccggaga

SEQ ID NO: 9486 - RNA, 20 nt, Homo sapiens
  source 1..20: mol_type = unassigned RNA
ttccacttactcaagcaaac

SEQ ID NO: 9487 - RNA, 20 nt, Homo sapiens
  source 1..20: mol_type = unassigned RNA
gagtcacaacagcatttctc

SEQ ID NO: 9488 - RNA, 20 nt, Homo sapiens
  source 1..20: mol_type = unassigned RNA
ggaaagtgccctgtacctgc

SEQ ID NO: 9489 - RNA, 20 nt, Homo sapiens
  source 1..20: mol_type = unassigned RNA
tgccctcctgcccacgtgtc

SEQ ID NO: 9490 - RNA, 20 nt, Homo sapiens
  source 1..20: mol_type = unassigned RNA
gccctcctgcccacgtgtcc

SEQ ID NO: 9491 - RNA, 20 nt, Homo sapiens
  source 1..20: mol_type = unassigned RNA
ctcctgcccacgtgtccggg

SEQ ID NO: 9492 - RNA, 20 nt, Homo sapiens
  source 1..20: mol_type = unassigned RNA
cgggaggcctcagtgaagta

SEQ ID NO: 9493 - RNA, 20 nt, Homo sapiens
  source 1..20: mol_type = unassigned RNA
gggaggcctcagtgaagtaa

SEQ ID NO: 9494 - RNA, 20 nt, Homo sapiens
  source 1..20: mol_type = unassigned RNA
ggaggcctcagtgaagtaag

SEQ ID NO: 9495 - RNA, 20 nt, Homo sapiens
  source 1..20: mol_type = unassigned RNA
tcagtgaagtaaggggatgt

SEQ ID NO: 9496 - RNA, 20 nt, Homo sapiens
  source 1..20: mol_type = unassigned RNA
gactcagactagaagggaaa

SEQ ID NO: 9497 - RNA, 20 nt, Homo sapiens
  source 1..20: mol_type = unassigned RNA
tgttgtgactcagactagaa

SEQ ID NO: 9498 - RNA, 20 nt, Homo sapiens
  source 1..20: mol_type = unassigned RNA
ctgttgtgactcagactaga

SEQ ID NO: 9499 - RNA, 20 nt, Homo sapiens
  source 1..20: mol_type = unassigned RNA
cagtgtctccagcaggtaca

SEQ ID NO: 9500 - RNA, 20 nt, Homo sapiens
  source 1..20: mol_type = unassigned RNA
gcagtgtctccagcaggtac

SEQ ID NO: 9501 - RNA, 20 nt, Homo sapiens
  source 1..20: mol_type = unassigned RNA
aggagggcagtgtctccagc

SEQ ID NO: 9502 - RNA, 20 nt, Homo sapiens
  source 1..20: mol_type = unassigned RNA
tcccggacacgtgggcagga

SEQ ID NO: 9503 - RNA, 20 nt, Homo sapiens
  source 1..20: mol_type = unassigned RNA
ctcccggacacgtgggcagg

SEQ ID NO: 9504 - RNA, 20 nt, Homo sapiens
  source 1..20: mol_type = unassigned RNA
ggcctcccggacacgtgggc

SEQ ID NO: 9505 - RNA, 20 nt, Homo sapiens
  source 1..20: mol_type = unassigned RNA
ctgaggcctcccggacacgt

SEQ ID NO: 9506 - RNA, 20 nt, Homo sapiens
  source 1..20: mol_type = unassigned RNA
actgaggcctcccggacacg

SEQ ID NO: 9507 - RNA, 20 nt, Homo sapiens
  source 1..20: mol_type = unassigned RNA
cttacttcactgaggcctcc

SEQ ID NO: 9508 - RNA, 20 nt, Homo sapiens
  source 1..20: mol_type = unassigned RNA
aacatccccttacttcactg

SEQ ID NO: 9509 - RNA, 20 nt, Homo sapiens
  source 1..20: mol_type = unassigned RNA
aggcccttctctctgcagcc

SEQ ID NO: 9510 - RNA, 20 nt, Homo sapiens
  source 1..20: mol_type = unassigned RNA
ggcccttctctctgcagcct

SEQ ID NO: 9511 - RNA, 20 nt, Homo sapiens
  source 1..20: mol_type = unassigned RNA
tgggctctgagcagagcttc

SEQ ID NO: 9512 - RNA, 20 nt, Homo sapiens
  source 1..20: mol_type = unassigned RNA
ccggattcacttctccagag

SEQ ID NO: 9513 - RNA, 20 nt, Homo sapiens
  source 1..20: mol_type = unassigned RNA
tcacttctccagagaggacc

SEQ ID NO: 9514 - RNA, 20 nt, Homo sapiens
  source 1..20: mol_type = unassigned RNA
ttctccagagaggaccaggc

SEQ ID NO: 9515 - RNA, 20 nt, Homo sapiens
  source 1..20: mol_type = unassigned RNA
tctccagagaggaccaggct

SEQ ID NO: 9516 - RNA, 20 nt, Homo sapiens
  source 1..20: mol_type = unassigned RNA
accaggctgggaagacactc

SEQ ID NO: 9517 - RNA, 20 nt, Homo sapiens
  source 1..20: mol_type = unassigned RNA
gacactcaggtaatccctgc

SEQ ID NO: 9518 - RNA, 20 nt, Homo sapiens
  source 1..20: mol_type = unassigned RNA
acactcaggtaatccctgca

SEQ ID NO: 9519 - RNA, 20 nt, Homo sapiens
  source 1..20: mol_type = unassigned RNA
aggctgcagagagaagggcc

SEQ ID NO: 9520 - RNA, 20 nt, Homo sapiens
  source 1..20: mol_type = unassigned RNA
agcccaggctgcagagagaa

SEQ ID NO: 9521 - RNA, 20 nt, Homo sapiens
  source 1..20: mol_type = unassigned RNA
gagcccaggctgcagagaga

SEQ ID NO: 9522 - RNA, 20 nt, Homo sapiens
  source 1..20: mol_type = unassigned RNA
ggaagctctgctcagagccc

SEQ ID NO: 9523 - RNA, 20 nt, Homo sapiens
  source 1..20: mol_type = unassigned RNA
cctctctggagaagtgaatc

SEQ ID NO: 9524 - RNA, 20 nt, Homo sapiens
  source 1..20: mol_type = unassigned RNA
cttcccagcctggtcctctc

SEQ ID NO: 9525 - RNA, 20 nt, Homo sapiens
  source 1..20: mol_type = unassigned RNA
acctgagtgtcttcccagcc

SEQ ID NO: 9526 - RNA, 20 nt, Homo sapiens
  source 1..20: mol_type = unassigned RNA
ggctaagtgagtgcagcttc

SEQ ID NO: 9527 - RNA, 20 nt, Homo sapiens
  source 1..20: mol_type = unassigned RNA
tccggccagagcacgtgtcc

SEQ ID NO: 9528 - RNA, 20 nt, Homo sapiens
  source 1..20: mol_type = unassigned RNA
gccagagcacgtgtccaggc

SEQ ID NO: 9529 - RNA, 20 nt, Homo sapiens
  source 1..20: mol_type = unassigned RNA
cacgtgtccaggctggccac

SEQ ID NO: 9530 - RNA, 20 nt, Homo sapiens
  source 1..20: mol_type = unassigned RNA
gagcaagtccctgcagctga

SEQ ID NO: 9531 - RNA, 20 nt, Homo sapiens
  source 1..20: mol_type = unassigned RNA
agcctgagggcagaaagcca

SEQ ID NO: 9532 - RNA, 20 nt, Homo sapiens
  source 1..20: mol_type = unassigned RNA
tagcctgagggcagaaagcc

SEQ ID NO: 9533 - RNA, 20 nt, Homo sapiens
  source 1..20: mol_type = unassigned RNA
gctgcactcacttagcctga

SEQ ID NO: 9534 - RNA, 20 nt, Homo sapiens
  source 1..20: mol_type = unassigned RNA
agctgcactcacttagcctg

SEQ ID NO: 9535 - RNA, 20 nt, Homo sapiens
  source 1..20: mol_type = unassigned RNA
gcctggacacgtgctctggc

SEQ ID NO: 9536 - RNA, 20 nt, Homo sapiens
  source 1..20: mol_type = unassigned RNA
gccagcctggacacgtgctc

SEQ ID NO: 9537 - RNA, 20 nt, Homo sapiens
  source 1..20: mol_type = unassigned RNA
gctcaagccggtggccagcc

SEQ ID NO: 9538 - RNA, 20 nt, Homo sapiens
  source 1..20: mol_type = unassigned RNA
cagggacttgctcaagccgg

SEQ ID NO: 9539 - RNA, 20 nt, Homo sapiens
  source 1..20: mol_type = unassigned RNA
ctgcagggacttgctcaagc

SEQ ID NO: 9540 - RNA, 20 nt, Homo sapiens
  source 1..20: mol_type = unassigned RNA
cgtgagctccgtcagctgca

SEQ ID NO: 9541 - RNA, 20 nt, Homo sapiens
  source 1..20: mol_type = unassigned RNA
acgtgagctccgtcagctgc

SEQ ID NO: 9542 - RNA, 20 nt, Homo sapiens
  source 1..20: mol_type = unassigned RNA
caggctgacccagtgctgcc

SEQ ID NO: 9543 - RNA, 20 nt, Homo sapiens
  source 1..20: mol_type = unassigned RNA
aggctgacccagtgctgcct

SEQ ID NO: 9544 - RNA, 20 nt, Homo sapiens
  source 1..20: mol_type = unassigned RNA
ctgcctgggccagaagcagc

SEQ ID NO: 9545 - RNA, 20 nt, Homo sapiens
  source 1..20: mol_type = unassigned RNA
gctggccatcctcctgagct

SEQ ID NO: 9546 - RNA, 20 nt, Homo sapiens
  source 1..20: mol_type = unassigned RNA
ggccatcctcctgagcttgg

SEQ ID NO: 9547 - RNA, 20 nt, Homo sapiens
  source 1..20: mol_type = unassigned RNA
gccatcctcctgagcttggt

SEQ ID NO: 9548 - RNA, 20 nt, Homo sapiens
  source 1..20: mol_type = unassigned RNA
ccatcctcctgagcttggtg

SEQ ID NO: 9549 - RNA, 20 nt, Homo sapiens
  source 1..20: mol_type = unassigned RNA
agcttggtggggcgacccgc

SEQ ID NO: 9550 - RNA, 20 nt, Homo sapiens
  source 1..20: mol_type = unassigned RNA
gcttggtggggcgacccgca

SEQ ID NO: 9551 - RNA, 20 nt, Homo sapiens
  source 1..20: mol_type = unassigned RNA
ccgcagggctgttcagcctc

SEQ ID NO: 9552 - RNA, 20 nt, Homo sapiens
  source 1..20: mol_type = unassigned RNA
ctgggtcagcctggagacag

SEQ ID NO: 9553 - RNA, 20 nt, Homo sapiens
  source 1..20: mol_type = unassigned RNA
caggcagcactgggtcagcc

SEQ ID NO: 9554 - RNA, 20 nt, Homo sapiens
  source 1..20: mol_type = unassigned RNA
cttctggcccaggcagcact

SEQ ID NO: 9555 - RNA, 20 nt, Homo sapiens
  source 1..20: mol_type = unassigned RNA
gcttctggcccaggcagcac

SEQ ID NO: 9556 - RNA, 20 nt, Homo sapiens
  source 1..20: mol_type = unassigned RNA
tggccagctgcttctggccc

SEQ ID NO: 9557 - RNA, 20 nt, Homo sapiens
  source 1..20: mol_type = unassigned RNA
ggaggatggccagctgcttc

SEQ ID NO: 9558 - RNA, 20 nt, Homo sapiens
  source 1..20: mol_type = unassigned RNA
ccccaccaagctcaggagga

SEQ ID NO: 9559 - RNA, 20 nt, Homo sapiens
  source 1..20: mol_type = unassigned RNA
gtcgccccaccaagctcagg

SEQ ID NO: 9560 - RNA, 20 nt, Homo sapiens
  source 1..20: mol_type = unassigned RNA
cgggtcgccccaccaagctc

SEQ ID NO: 9561 - RNA, 20 nt, Homo sapiens
  source 1..20: mol_type = unassigned RNA
ctgaggctgaacagccctgc

SEQ ID NO: 9562 - RNA, 20 nt, Homo sapiens
  source 1..20: mol_type = unassigned RNA
cctgaggctgaacagccctg

SEQ ID NO: 9563 - RNA, 20 nt, Homo sapiens
  source 1..20: mol_type = unassigned RNA
agcgggggaggaggtacctg

SEQ ID NO: 9564 - RNA, 20 nt, Homo sapiens
  source 1..20: mol_type = unassigned RNA
ccccttctgtgacagggtgc

SEQ ID NO: 9565 - RNA, 20 nt, Homo sapiens
  source 1..20: mol_type = unassigned RNA
gtgacagggtgcaggagccg

SEQ ID NO: 9566 - RNA, 20 nt, Homo sapiens
  source 1..20: mol_type = unassigned RNA
tgacagggtgcaggagccgt

SEQ ID NO: 9567 - RNA, 20 nt, Homo sapiens
  source 1..20: mol_type = unassigned RNA
cagggtgcaggagccgtggg

SEQ ID NO: 9568 - RNA, 20 nt, Homo sapiens
  source 1..20: mol_type = unassigned RNA
agccgtgggcggacagagcc

SEQ ID NO: 9569 - RNA, 20 nt, Homo sapiens
  source 1..20: mol_type = unassigned RNA
gccgtgggcggacagagcca

SEQ ID NO: 9570 - RNA, 20 nt, Homo sapiens
  source 1..20: mol_type = unassigned RNA
cctgttagaagtctgcgccc

SEQ ID NO: 9571 - RNA, 20 nt, Homo sapiens
  source 1..20: mol_type = unassigned RNA
gaagtctgcgcccaggcctc

SEQ ID NO: 9572 - RNA, 20 nt, Homo sapiens
  source 1..20: mol_type = unassigned RNA
caggcagtgtcactgaaatc

SEQ ID NO: 9573 - RNA, 20 nt, Homo sapiens
  source 1..20: mol_type = unassigned RNA
atcaggtgagtccagagaag

SEQ ID NO: 9574 - RNA, 20 nt, Homo sapiens
  source 1..20: mol_type = unassigned RNA
cctgcaccctgtcacagaag

SEQ ID NO: 9575 - RNA, 20 nt, Homo sapiens
  source 1..20: mol_type = unassigned RNA
tcctgcaccctgtcacagaa

SEQ ID NO: 9576 - RNA, 20 nt, Homo sapiens
  source 1..20: mol_type = unassigned RNA
ctcctgcaccctgtcacaga

SEQ ID NO: 9577 - RNA, 20 nt, Homo sapiens
  source 1..20: mol_type = unassigned RNA
accctggctctgtccgccca

SEQ ID NO: 9578 - RNA, 20 nt, Homo sapiens
  source 1..20: mol_type = unassigned RNA
ttctaacagggagagaaccc

SEQ ID NO: 9579 - RNA, 20 nt, Homo sapiens
  source 1..20: mol_type = unassigned RNA
ctgggcgcagacttctaaca

SEQ ID NO: 9580 - RNA, 20 nt, Homo sapiens
  source 1..20: mol_type = unassigned RNA
cctgggcgcagacttctaac

SEQ ID NO: 9581 - RNA, 20 nt, Homo sapiens
  source 1..20: mol_type = unassigned RNA
agtgacactgcctgaggcct

SEQ ID NO: 9582 - RNA, 20 nt, Homo sapiens
  source 1..20: mol_type = unassigned RNA
cagtgacactgcctgaggcc

SEQ ID NO: 9583 - RNA, 20 nt, Homo sapiens
  source 1..20: mol_type = unassigned RNA
gatttcagtgacactgcctg

SEQ ID NO: 9584 - RNA, 20 nt, Homo sapiens
  source 1..20: mol_type = unassigned RNA
gcagcagctctgtgtccagc

SEQ ID NO: 9585 - RNA, 20 nt, Homo sapiens
  source 1..20: mol_type = unassigned RNA
ccagctggaatttcctcgcc

SEQ ID NO: 9586 - RNA, 20 nt, Homo sapiens
  source 1..20: mol_type = unassigned RNA
ggaagagaatccagaagctg

SEQ ID NO: 9587 - RNA, 20 nt, Homo sapiens
  source 1..20: mol_type = unassigned RNA
atccagaagctgtggcactc

SEQ ID NO: 9588 - RNA, 20 nt, Homo sapiens
  source 1..20: mol_type = unassigned RNA
cagaagctgtggcactcagg

SEQ ID NO: 9589 - RNA, 20 nt, Homo sapiens
  source 1..20: mol_type = unassigned RNA
agaagctgtggcactcaggt

SEQ ID NO: 9590 - RNA, 20 nt, Homo sapiens
  source 1..20: mol_type = unassigned RNA
ctcaggtgggacccagcacc

SEQ ID NO: 9591 - RNA, 20 nt, Homo sapiens
  source 1..20: mol_type = unassigned RNA
tcaggtgggacccagcacca

SEQ ID NO: 9592 - RNA, 20 nt, Homo sapiens
  source 1..20: mol_type = unassigned RNA
gctgggtctcggagatgctg

SEQ ID NO: 9593 - RNA, 20 nt, Homo sapiens
  source 1..20: mol_type = unassigned RNA
acagagctgctgctgggtct

SEQ ID NO: 9594 - RNA, 20 nt, Homo sapiens
  source 1..20: mol_type = unassigned RNA
ctggacacagagctgctgct

SEQ ID NO: 9595 - RNA, 20 nt, Homo sapiens
  source 1..20: mol_type = unassigned RNA
gctggacacagagctgctgc

SEQ ID NO: 9596 - RNA, 20 nt, Homo sapiens
  source 1..20: mol_type = unassigned RNA
cctggcgaggaaattccagc

SEQ ID NO: 9597 - RNA, 20 nt, Homo sapiens
  source 1..20: mol_type = unassigned RNA
tctggattctcttcctggcg

SEQ ID NO: 9598 - RNA, 20 nt, Homo sapiens
  source 1..20: mol_type = unassigned RNA
cagcttctggattctcttcc

SEQ ID NO: 9599 - RNA, 20 nt, Homo sapiens
  source 1..20: mol_type = unassigned RNA
cacctgagtgccacagcttc

SEQ ID NO: 9600 - RNA, 20 nt, Homo sapiens
  source 1..20: mol_type = unassigned RNA
ctccctgtctgtgtccaggt

SEQ ID NO: 9601 - RNA, 20 nt, Homo sapiens
  source 1..20: mol_type = unassigned RNA
aggttggctcactgtgacct

SEQ ID NO: 9602 - RNA, 20 nt, Homo sapiens
  source 1..20: mol_type = unassigned RNA
gcccaccacagccttcttgt

SEQ ID NO: 9603 - RNA, 20 nt, Homo sapiens
  source 1..20: mol_type = unassigned RNA
cccaccacagccttcttgtc

SEQ ID NO: 9604 - RNA, 20 nt, Homo sapiens
  source 1..20: mol_type = unassigned RNA
ccttcttgtcgggcagctga

SEQ ID NO: 9605 - RNA, 20 nt, Homo sapiens
  source 1..20: mol_type = unassigned RNA
agctgatggagacatgtgcc

SEQ ID NO: 9606 - RNA, 20 nt, Homo sapiens
  source 1..20: mol_type = unassigned RNA
gtgccaggctgcagcagctc

SEQ ID NO: 9607 - RNA, 20 nt, Homo sapiens
  source 1..20: mol_type = unassigned RNA
cagcagctcaggtcagcgcc

SEQ ID NO: 9608 - RNA, 20 nt, Homo sapiens
  source 1..20: mol_type = unassigned RNA
agccaacctggacacagaca

SEQ ID NO: 9609 - RNA, 20 nt, Homo sapiens
  source 1..20: mol_type = unassigned RNA
gagccaacctggacacagac

SEQ ID NO: 9610 - RNA, 20 nt, Homo sapiens
  source 1..20: mol_type = unassigned RNA
aaggtcacagtgagccaacc

SEQ ID NO: 9611 - RNA, 20 nt, Homo sapiens
  source 1..20: mol_type = unassigned RNA
gaaggctgtggtgggctcca

SEQ ID NO: 9612 - RNA, 20 nt, Homo sapiens
  source 1..20: mol_type = unassigned RNA
cccgacaagaaggctgtggt

SEQ ID NO: 9613 - RNA, 20 nt, Homo sapiens
  source 1..20: mol_type = unassigned RNA
gcccgacaagaaggctgtgg

SEQ ID NO: 9614 - RNA, 20 nt, Homo sapiens
  source 1..20: mol_type = unassigned RNA
gctgcccgacaagaaggctg

SEQ ID NO: 9615 - RNA, 20 nt, Homo sapiens
  source 1..20: mol_type = unassigned RNA
ccatcagctgcccgacaaga

SEQ ID NO: 9616 - RNA, 20 nt, Homo sapiens
  source 1..20: mol_type = unassigned RNA
tgacctgagctgctgcagcc

SEQ ID NO: 9617 - RNA, 20 nt, Homo sapiens
  source 1..20: mol_type = unassigned RNA
ggaccttttcagcttgtctc

SEQ ID NO: 9618 - RNA, 20 nt, Homo sapiens
  source 1..20: mol_type = unassigned RNA
gtctcaggttaacctctgtg

SEQ ID NO: 9619 - RNA, 20 nt, Homo sapiens
  source 1..20: mol_type = unassigned RNA
tctctgagctgaagacattt

SEQ ID NO: 9620 - RNA, 20 nt, Homo sapiens
  source 1..20: mol_type = unassigned RNA
agacaagctgaaaaggtcca

SEQ ID NO: 9621 - RNA, 20 nt, Homo sapiens
  source 1..20: mol_type = unassigned RNA
taacctgagacaagctgaaa

SEQ ID NO: 9622 - RNA, 20 nt, Homo sapiens
  source 1..20: mol_type = unassigned RNA
tggcatcatcgtcctcacag

SEQ ID NO: 9623 - RNA, 20 nt, Homo sapiens
  source 1..20: mol_type = unassigned RNA
gctctgcagcagcagggaac

SEQ ID NO: 9624 - RNA, 20 nt, Homo sapiens
  source 1..20: mol_type = unassigned RNA
caggaggctctgcagcagca

SEQ ID NO: 9625 - RNA, 20 nt, Homo sapiens
  source 1..20: mol_type = unassigned RNA
gcaggaggctctgcagcagc

SEQ ID NO: 9626 - RNA, 20 nt, Homo sapiens
  source 1..20: mol_type = unassigned RNA
gctcagagagggacagcagg

SEQ ID NO: 9627 - RNA, 20 nt, Homo sapiens
  source 1..20: mol_type = unassigned RNA
tcagctcagagagggacagc

SEQ ID NO: 9628 - RNA, 20 nt, Homo sapiens
  source 1..20: mol_type = unassigned RNA
aaatgtcttcagctcagaga

SEQ ID NO: 9629 - RNA, 20 nt, Homo sapiens
  source 1..20: mol_type = unassigned RNA
gaaatgtcttcagctcagag

SEQ ID NO: 9630 - RNA, 20 nt, Homo sapiens
  source 1..20: mol_type = unassigned RNA
ctccagctgtgtgagcaccg

SEQ ID NO: 9631 - RNA, 20 nt, Homo sapiens
  source 1..20: mol_type = unassigned RNA
tccagctgtgtgagcaccga

SEQ ID NO: 9632 - RNA, 20 nt, Homo sapiens
  source 1..20: mol_type = unassigned RNA
caccgagggcctcgcccacc

SEQ ID NO: 9633 - RNA, 20 nt, Homo sapiens
  source 1..20: mol_type = unassigned RNA
ggcctcgcccacctggcatc

SEQ ID NO: 9634 - RNA, 20 nt, Homo sapiens
  source 1..20: mol_type = unassigned RNA
cgcccacctggcatctggtc

SEQ ID NO: 9635 - RNA, 20 nt, Homo sapiens
  source 1..20: mol_type = unassigned RNA
gcccacctggcatctggtct

SEQ ID NO: 9636 - RNA, 20 nt, Homo sapiens
  source 1..20: mol_type = unassigned RNA
tctgggccactgccaccact

SEQ ID NO: 9637 - RNA, 20 nt, Homo sapiens
  source 1..20: mol_type = unassigned RNA
gggccactgccaccacttgg

SEQ ID NO: 9638 - RNA, 20 nt, Homo sapiens
  source 1..20: mol_type = unassigned RNA
ctgccaccacttggaggagc

SEQ ID NO: 9639 - RNA, 20 nt, Homo sapiens
  source 1..20: mol_type = unassigned RNA
agctggagtgagttgcagag

SEQ ID NO: 9640 - RNA, 20 nt, Homo sapiens
  source 1..20: mol_type = unassigned RNA
tggagtgagttgcagagtgg

SEQ ID NO: 9641 - RNA, 20 nt, Homo sapiens
  source 1..20: mol_type = unassigned RNA
ggagtgagttgcagagtgga

SEQ ID NO: 9642 - RNA, 20 nt, Homo sapiens
  source 1..20: mol_type = unassigned RNA
tcagcctggtgggggtcaaa

SEQ ID NO: 9643 - RNA, 20 nt, Homo sapiens
  source 1..20: mol_type = unassigned RNA
gtcagcctggtgggggtcaa

SEQ ID NO: 9644 - RNA, 20 nt, Homo sapiens
  source 1..20: mol_type = unassigned RNA
gctggaggtcagcctggtgg

SEQ ID NO: 9645 - RNA, 20 nt, Homo sapiens
  source 1..20: mol_type = unassigned RNA
agctggaggtcagcctggtg

SEQ ID NO: 9646 - RNA, 20 nt, Homo sapiens
  source 1..20: mol_type = unassigned RNA
cagctggaggtcagcctggt

SEQ ID NO: 9647 - RNA, 20 nt, Homo sapiens
  source 1..20: mol_type = unassigned RNA
acagctggaggtcagcctgg

SEQ ID NO: 9648 - RNA, 20 nt, Homo sapiens
  source 1..20: mol_type = unassigned RNA
cacacagctggaggtcagcc

SEQ ID NO: 9649 - RNA, 20 nt, Homo sapiens
  source 1..20: mol_type = unassigned RNA
ctcggtgctcacacagctgg

SEQ ID NO: 9650 - RNA, 20 nt, Homo sapiens
  source 1..20: mol_type = unassigned RNA
gccctcggtgctcacacagc

SEQ ID NO: 9651 - RNA, 20 nt, Homo sapiens
  source 1..20: mol_type = unassigned RNA
tgccaggtgggcgaggccct

SEQ ID NO: 9652 - RNA, 20 nt, Homo sapiens
  source 1..20: mol_type = unassigned RNA
gaccagatgccaggtgggcg

SEQ ID NO: 9653 - RNA, 20 nt, Homo sapiens
  source 1..20: mol_type = unassigned RNA
gcccagaccagatgccaggt

SEQ ID NO: 9654 - RNA, 20 nt, Homo sapiens
  source 1..20: mol_type = unassigned RNA
ggcccagaccagatgccagg

SEQ ID NO: 9655 - RNA, 20 nt, Homo sapiens
  source 1..20: mol_type = unassigned RNA
agtggcccagaccagatgcc

SEQ ID NO: 9656 - RNA, 20 nt, Homo sapiens
  source 1..20: mol_type = unassigned RNA
gctcctccaagtggtggcag

SEQ ID NO: 9657 - RNA, 20 nt, Homo sapiens
  source 1..20: mol_type = unassigned RNA
actccagctcctccaagtgg

SEQ ID NO: 9658 - RNA, 20 nt, Homo sapiens
  source 1..20: mol_type = unassigned RNA
ctcactccagctcctccaag

SEQ ID NO: 9659 - RNA, 20 nt, Homo sapiens
  source 1..20: mol_type = unassigned RNA
gtctaacaatcaatttgatg

SEQ ID NO: 9660 - RNA, 20 nt, Homo sapiens
  source 1..20: mol_type = unassigned RNA
taacaatcaatttgatgagg

SEQ ID NO: 9661 - RNA, 20 nt, Homo sapiens
  source 1..20: mol_type = unassigned RNA
aacaatcaatttgatgagga

SEQ ID NO: 9662 - RNA, 20 nt, Homo sapiens
  source 1..20: mol_type = unassigned RNA
atttgatgaggagggcacca

SEQ ID NO: 9663 - RNA, 20 nt, Homo sapiens
  source 1..20: mol_type = unassigned RNA
agggcaccaaggcgctgatg

SEQ ID NO: 9664 - RNA, 20 nt, Homo sapiens
  source 1..20: mol_type = unassigned RNA
gggcaccaaggcgctgatga

SEQ ID NO: 9665 - RNA, 20 nt, Homo sapiens
  source 1..20: mol_type = unassigned RNA
ggcgctgatgagggcccttg

SEQ ID NO: 9666 - RNA, 20 nt, Homo sapiens
  source 1..20: mol_type = unassigned RNA
gcgctgatgagggcccttga

SEQ ID NO: 9667 - RNA, 20 nt, Homo sapiens
  source 1..20: mol_type = unassigned RNA
cgctgatgagggcccttgag

SEQ ID NO: 9668 - RNA, 20 nt, Homo sapiens
  source 1..20: mol_type = unassigned RNA
tgagggcccttgaggggaaa

SEQ ID NO: 9669 - RNA, 20 nt, Homo sapiens
  source 1..20: mol_type = unassigned RNA
aggggaaatggatgctaaag

SEQ ID NO: 9670 - RNA, 20 nt, Homo sapiens
  source 1..20: mol_type = unassigned RNA
gaaatggatgctaaagaggc

SEQ ID NO: 9671 - RNA, 20 nt, Homo sapiens
  source 1..20: mol_type = unassigned RNA
gaggctggagtaagtagtga

SEQ ID NO: 9672 - RNA, 20 nt, Homo sapiens
  source 1..20: mol_type = unassigned RNA
gctggagtaagtagtgatgg

SEQ ID NO: 9673 - RNA, 20 nt, Homo sapiens
  source 1..20: mol_type = unassigned RNA
tagacaagctgcagaagacc

SEQ ID NO: 9674 - RNA, 20 nt, Homo sapiens
  source 1..20: mol_type = unassigned RNA
aagggccctcatcagcgcct

SEQ ID NO: 9675 - RNA, 20 nt, Homo sapiens
  source 1..20: mol_type = unassigned RNA
tagcatccatttcccctcaa

SEQ ID NO: 9676 - RNA, 20 nt, Homo sapiens
  source 1..20: mol_type = unassigned RNA
ttagcatccatttcccctca

SEQ ID NO: 9677 - RNA, 20 nt, Homo sapiens
  source 1..20: mol_type = unassigned RNA
tctgctgaacagctccacct

SEQ ID NO: 9678 - RNA, 20 nt, Homo sapiens
  source 1..20: mol_type = unassigned RNA
tgacctgcctgcagagcctc

SEQ ID NO: 9679 - RNA, 20 nt, Homo sapiens
  source 1..20: mol_type = unassigned RNA
gcctcaggtgagtgaccgag

SEQ ID NO: 9680 - RNA, 20 nt, Homo sapiens
  source 1..20: mol_type = unassigned RNA
aggctggagaagaggaggcc

SEQ ID NO: 9681 - RNA, 20 nt, Homo sapiens
  source 1..20: mol_type = unassigned RNA
gactgaggctggagaagagg

SEQ ID NO: 9682 - RNA, 20 nt, Homo sapiens
  source 1..20: mol_type = unassigned RNA
ggtgactgaggctggagaag

SEQ ID NO: 9683 - RNA, 20 nt, Homo sapiens
  source 1..20: mol_type = unassigned RNA
cagcagaaggtgactgaggc

SEQ ID NO: 9684 - RNA, 20 nt, Homo sapiens
  source 1..20: mol_type = unassigned RNA
tgttcagcagaaggtgactg

SEQ ID NO: 9685 - RNA, 20 nt, Homo sapiens
  source 1..20: mol_type = unassigned RNA
aggtggagctgttcagcaga

SEQ ID NO: 9686 - RNA, 20 nt, Homo sapiens
  source 1..20: mol_type = unassigned RNA
gtgagtaagcaaggccaagg

SEQ ID NO: 9687 - RNA, 20 nt, Homo sapiens
  source 1..20: mol_type = unassigned RNA
tctgtgagtaagcaaggcca

SEQ ID NO: 9688 - RNA, 20 nt, Homo sapiens
  source 1..20: mol_type = unassigned RNA
gcttagtctgtgagtaagca

SEQ ID NO: 9689 - RNA, 20 nt, Homo sapiens
  source 1..20: mol_type = unassigned RNA
ggctctgcaggcaggtcatc

SEQ ID NO: 9690 - RNA, 20 nt, Homo sapiens
  source 1..20: mol_type = unassigned RNA
tcacctgaggctctgcaggc

SEQ ID NO: 9691 - RNA, 20 nt, Homo sapiens
  source 1..20: mol_type = unassigned RNA
tcactcacctgaggctctgc

SEQ ID NO: 9692 - RNA, 20 nt, Homo sapiens
  source 1..20: mol_type = unassigned RNA
gccgctcggtcactcacctg

SEQ ID NO: 9693 - RNA, 20 nt, Homo sapiens
  source 1..20: mol_type = unassigned RNA
cctgcttttccagactgaac

SEQ ID NO: 9694 - RNA, 20 nt, Homo sapiens
  source 1..20: mol_type = unassigned RNA
agactgaacaggaacagtat

SEQ ID NO: 9695 - RNA, 20 nt, Homo sapiens
  source 1..20: mol_type = unassigned RNA
aggaacagtatcggtgatgt

SEQ ID NO: 9696 - RNA, 20 nt, Homo sapiens
  source 1..20: mol_type = unassigned RNA
cggttgctgccacctttctg

SEQ ID NO: 9697 - RNA, 20 nt, Homo sapiens
  source 1..20: mol_type = unassigned RNA
gccacctttctgaggctctc

SEQ ID NO: 9698 - RNA, 20 nt, Homo sapiens
  source 1..20: mol_type = unassigned RNA
ccacctttctgaggctctca

SEQ ID NO: 9699 - RNA, 20 nt, Homo sapiens
  source 1..20: mol_type = unassigned RNA
cagggctgccaccagcctag

SEQ ID NO: 9700 - RNA, 20 nt, Homo sapiens
  source 1..20: mol_type = unassigned RNA
tgccaccagcctagaggagc

SEQ ID NO: 9701 - RNA, 20 nt, Homo sapiens
  source 1..20: mol_type = unassigned RNA
ctgttcagtctggaaaagca

SEQ ID NO: 9702 - RNA, 20 nt, Homo sapiens
  source 1..20: mol_type = unassigned RNA
cctgttcagtctggaaaagc

SEQ ID NO: 9703 - RNA, 20 nt, Homo sapiens
  source 1..20: mol_type = unassigned RNA
gatactgttcctgttcagtc

SEQ ID NO: 9704 - RNA, 20 nt, Homo sapiens
  source 1..20: mol_type = unassigned RNA
ccctgagagcctcagaaagg

SEQ ID NO: 9705 - RNA, 20 nt, Homo sapiens
  source 1..20: mol_type = unassigned RNA
cagccctgagagcctcagaa

SEQ ID NO: 9706 - RNA, 20 nt, Homo sapiens
  source 1..20: mol_type = unassigned RNA
ctccagctcctctaggctgg

SEQ ID NO: 9707 - RNA, 20 nt, Homo sapiens
  source 1..20: mol_type = unassigned RNA
tcactccagctcctctaggc

SEQ ID NO: 9708 - RNA, 20 nt, Homo sapiens
  source 1..20: mol_type = unassigned RNA
caactcactccagctcctct

SEQ ID NO: 9709 - RNA, 20 nt, Homo sapiens
  source 1..20: mol_type = unassigned RNA
agcttgagccacaaccagat

SEQ ID NO: 9710 - RNA, 20 nt, Homo sapiens
  source 1..20: mol_type = unassigned RNA
cacaaccagattggagacgc

SEQ ID NO: 9711 - RNA, 20 nt, Homo sapiens
  source 1..20: mol_type = unassigned RNA
cacttagctaccatcctgcc

SEQ ID NO: 9712 - RNA, 20 nt, Homo sapiens
  source 1..20: mol_type = unassigned RNA
acttagctaccatcctgcct

SEQ ID NO: 9713 - RNA, 20 nt, Homo sapiens
  source 1..20: mol_type = unassigned RNA
tgcctgggctgccagagctc

SEQ ID NO: 9714 - RNA, 20 nt, Homo sapiens
  source 1..20: mol_type = unassigned RNA
tggttgtggctcaagcttgg

SEQ ID NO: 9715 - RNA, 20 nt, Homo sapiens
  source 1..20: mol_type = unassigned RNA
ctggttgtggctcaagcttg

SEQ ID NO: 9716 - RNA, 20 nt, Homo sapiens
  source 1..20: mol_type = unassigned RNA
tctggttgtggctcaagctt

SEQ ID NO: 9717 - RNA, 20 nt, Homo sapiens
  source 1..20: mol_type = unassigned RNA
atctggttgtggctcaagct

SEQ ID NO: 9718 - RNA, 20 nt, Homo sapiens
  source 1..20: mol_type = unassigned RNA
cagcgtctccaatctggttg

SEQ ID NO: 9719 - RNA, 20 nt, Homo sapiens
  source 1..20: mol_type = unassigned RNA
ggacaccagcgtctccaatc

SEQ ID NO: 9720 - RNA, 20 nt, Homo sapiens
  source 1..20: mol_type = unassigned RNA
gcaggatggtagctaagtgc

SEQ ID NO: 9721 - RNA, 20 nt, Homo sapiens
  source 1..20: mol_type = unassigned RNA
ctctggcagcccaggcagga

SEQ ID NO: 9722 - RNA, 20 nt, Homo sapiens
  source 1..20: mol_type = unassigned RNA
tgagctctggcagcccaggc

SEQ ID NO: 9723 - RNA, 20 nt, Homo sapiens
  source 1..20: mol_type = unassigned RNA
ttcctgagctctggcagccc

SEQ ID NO: 9724 - RNA, 20 nt, Homo sapiens
  source 1..20: mol_type = unassigned RNA
cactctatcttcctgagctc

SEQ ID NO: 9725 - RNA, 20 nt, Homo sapiens
  source 1..20: mol_type = unassigned RNA
cccccctcccacagcctctc

SEQ ID NO: 9726 - RNA, 20 nt, Homo sapiens
  source 1..20: mol_type = unassigned RNA
ccccctcccacagcctctca

SEQ ID NO: 9727 - RNA, 20 nt, Homo sapiens
  source 1..20: mol_type = unassigned RNA
gggaatagcatcagctcagc

SEQ ID NO: 9728 - RNA, 20 nt, Homo sapiens
  source 1..20: mol_type = unassigned RNA
ggaatagcatcagctcagcc

SEQ ID NO: 9729 - RNA, 20 nt, Homo sapiens
  source 1..20: mol_type = unassigned RNA
gaatagcatcagctcagccg

SEQ ID NO: 9730 - RNA, 20 nt, Homo sapiens
  source 1..20: mol_type = unassigned RNA
aatagcatcagctcagccgg

SEQ ID NO: 9731 - RNA, 20 nt, Homo sapiens
  source 1..20: mol_type = unassigned RNA
ctcagccgggggagtgcagt

SEQ ID NO: 9732 - RNA, 20 nt, Homo sapiens
  source 1..20: mol_type = unassigned RNA
cagagtctctcgttctttgc

SEQ ID NO: 9733 - RNA, 20 nt, Homo sapiens
  source 1..20: mol_type = unassigned RNA
tctcgttctttgcaggcgcc

SEQ ID NO: 9734 - RNA, 20 nt, Homo sapiens
  source 1..20: mol_type = unassigned RNA
cgttctttgcaggcgcctgg

SEQ ID NO: 9735 - RNA, 20 nt, Homo sapiens
  source 1..20: mol_type = unassigned RNA
gttgatgtgagtgtctgccc

SEQ ID NO: 9736 - RNA, 20 nt, Homo sapiens
  source 1..20: mol_type = unassigned RNA
gatgtgagtgtctgcccagg

SEQ ID NO: 9737 - RNA, 20 nt, Homo sapiens
  source 1..20: mol_type = unassigned RNA
cctgagaggctgtgggaggg

SEQ ID NO: 9738 - RNA, 20 nt, Homo sapiens
  source 1..20: mol_type = unassigned RNA
ccctgagaggctgtgggagg

SEQ ID NO: 9739 - RNA, 20 nt, Homo sapiens
  source 1..20: mol_type = unassigned RNA
tccctgagaggctgtgggag

SEQ ID NO: 9740 - RNA, 20 nt, Homo sapiens
  source 1..20: mol_type = unassigned RNA
ttccctgagaggctgtggga

SEQ ID NO: 9741 - RNA, 20 nt, Homo sapiens
  source 1..20: mol_type = unassigned RNA
attccctgagaggctgtggg

SEQ ID NO: 9742 - RNA, 20 nt, Homo sapiens
  source 1..20: mol_type = unassigned RNA
gctattccctgagaggctgt

SEQ ID NO: 9743 - RNA, 20 nt, Homo sapiens
  source 1..20: mol_type = unassigned RNA
tgctattccctgagaggctg

SEQ ID NO: 9744 - RNA, 20 nt, Homo sapiens
  source 1..20: mol_type = unassigned RNA
agctgatgctattccctgag

SEQ ID NO: 9745 - RNA, 20 nt, Homo sapiens
  source 1..20: mol_type = unassigned RNA
ctctgccaactgcactcccc

SEQ ID NO: 9746 - RNA, 20 nt, Homo sapiens
  source 1..20: mol_type = unassigned RNA
acactcacatcaactcctcc

SEQ ID NO: 9747 - RNA, 20 nt, Homo sapiens
  source 1..20: mol_type = unassigned RNA
ttcctctcctcttccaggct

SEQ ID NO: 9748 - RNA, 20 nt, Homo sapiens
  source 1..20: mol_type = unassigned RNA
caggcttggctgcaatgccc

SEQ ID NO: 9749 - RNA, 20 nt, Homo sapiens
  source 1..20: mol_type = unassigned RNA
aggcttggctgcaatgccct

SEQ ID NO: 9750 - RNA, 20 nt, Homo sapiens
  source 1..20: mol_type = unassigned RNA
ggcttggctgcaatgccctg

SEQ ID NO: 9751 - RNA, 20 nt, Homo sapiens
  source 1..20: mol_type = unassigned RNA
gcttggctgcaatgccctgg

SEQ ID NO: 9752 - RNA, 20 nt, Homo sapiens
  source 1..20: mol_type = unassigned RNA
cctgggggatcccacagccc

SEQ ID NO: 9753 - RNA, 20 nt, Homo sapiens
  source 1..20: mol_type = unassigned RNA
ctgggggatcccacagccct

SEQ ID NO: 9754 - RNA, 20 nt, Homo sapiens
  source 1..20: mol_type = unassigned RNA
tgggggatcccacagccctg

SEQ ID NO: 9755 - RNA, 20 nt, Homo sapiens
  source 1..20: mol_type = unassigned RNA
ggatcccacagccctggggc

SEQ ID NO: 9756 - RNA, 20 nt, Homo sapiens
  source 1..20: mol_type = unassigned RNA
cacagccctggggctggctc

SEQ ID NO: 9757 - RNA, 20 nt, Homo sapiens
  source 1..20: mol_type = unassigned RNA
aggagctgccccagcacctg

SEQ ID NO: 9758 - RNA, 20 nt, Homo sapiens
  source 1..20: mol_type = unassigned RNA
ggagctgccccagcacctga

SEQ ID NO: 9759 - RNA, 20 nt, Homo sapiens
  source 1..20: mol_type = unassigned RNA
cctgagggtcctacagtgag

SEQ ID NO: 9760 - RNA, 20 nt, Homo sapiens
  source 1..20: mol_type = unassigned RNA
agccaagcctggaagaggag

SEQ ID NO: 9761 - RNA, 20 nt, Homo sapiens
  source 1..20: mol_type = unassigned RNA
attgcagccaagcctggaag

SEQ ID NO: 9762 - RNA, 20 nt, Homo sapiens
  source 1..20: mol_type = unassigned RNA
cagggcattgcagccaagcc

SEQ ID NO: 9763 - RNA, 20 nt, Homo sapiens
  source 1..20: mol_type = unassigned RNA
cagggctgtgggatccccca

SEQ ID NO: 9764 - RNA, 20 nt, Homo sapiens
  source 1..20: mol_type = unassigned RNA
ccagggctgtgggatccccc

SEQ ID NO: 9765 - RNA, 20 nt, Homo sapiens
  source 1..20: mol_type = unassigned RNA
tgagccagccccagggctgt

SEQ ID NO: 9766 - RNA, 20 nt, Homo sapiens
  source 1..20: mol_type = unassigned RNA
ctgagccagccccagggctg

SEQ ID NO: 9767 - RNA, 20 nt, Homo sapiens
  source 1..20: mol_type = unassigned RNA
cagctcctgagccagcccca

SEQ ID NO: 9768 - RNA, 20 nt, Homo sapiens
  source 1..20: mol_type = unassigned RNA
gcagctcctgagccagcccc

SEQ ID NO: 9769 - RNA, 20 nt, Homo sapiens
  source 1..20: mol_type = unassigned RNA
tgtaggaccctcaggtgctg

SEQ ID NO: 9770 - RNA, 20 nt, Homo sapiens
  source 1..20: mol_type = unassigned RNA
ctgtaggaccctcaggtgct

SEQ ID NO: 9771 - RNA, 20 nt, Homo sapiens
  source 1..20: mol_type = unassigned RNA
actgtaggaccctcaggtgc

SEQ ID NO: 9772 - RNA, 20 nt, Homo sapiens
  source 1..20: mol_type = unassigned RNA
ccactcactgtaggaccctc

SEQ ID NO: 9773 - RNA, 20 nt, Homo sapiens
  source 1..20: mol_type = unassigned RNA
ggcagggggccactcactgt

SEQ ID NO: 9774 - RNA, 20 nt, Homo sapiens
  source 1..20: mol_type = unassigned RNA
cagcctaccattcagccatc

SEQ ID NO: 9775 - RNA, 20 nt, Homo sapiens
  source 1..20: mol_type = unassigned RNA
agcctaccattcagccatct

SEQ ID NO: 9776 - RNA, 20 nt, Homo sapiens
  source 1..20: mol_type = unassigned RNA
ccattcagccatctgggccc

SEQ ID NO: 9777 - RNA, 20 nt, Homo sapiens
  source 1..20: mol_type = unassigned RNA
ttcagccatctgggcccagg

SEQ ID NO: 9778 - RNA, 20 nt, Homo sapiens
  source 1..20: mol_type = unassigned RNA
tcagccatctgggcccaggt

SEQ ID NO: 9779 - RNA, 20 nt, Homo sapiens
  source 1..20: mol_type = unassigned RNA
cagccatctgggcccaggtg

SEQ ID NO: 9780 - RNA, 20 nt, Homo sapiens
  source 1..20: mol_type = unassigned RNA
cccaggtggggccctgagcc

SEQ ID NO: 9781 - RNA, 20 nt, Homo sapiens
  source 1..20: mol_type = unassigned RNA
tggggccctgagcctggccc

SEQ ID NO: 9782 - RNA, 20 nt, Homo sapiens
  source 1..20: mol_type = unassigned RNA
cctgagcctggcccaggccc

SEQ ID NO: 9783 - RNA, 20 nt, Homo sapiens
  source 1..20: mol_type = unassigned RNA
agcctggcccaggccctgga

SEQ ID NO: 9784 - RNA, 20 nt, Homo sapiens
  source 1..20: mol_type = unassigned RNA
cctggatggatccccccatt

SEQ ID NO: 9785 - RNA, 20 nt, Homo sapiens
  source 1..20: mol_type = unassigned RNA
ccccccatttggaagagatc

SEQ ID NO: 9786 - RNA, 20 nt, Homo sapiens
  source 1..20: mol_type = unassigned RNA
ttggaagagatcaggtaagt

SEQ ID NO: 9787 - RNA, 20 nt, Homo sapiens
  source 1..20: mol_type = unassigned RNA
tggaagagatcaggtaagta

SEQ ID NO: 9788 - RNA, 20 nt, Homo sapiens
  source 1..20: mol_type = unassigned RNA
ggaagagatcaggtaagtag

SEQ ID NO: 9789 - RNA, 20 nt, Homo sapiens
  source 1..20: mol_type = unassigned RNA
taggctggggaaagaggaga

SEQ ID NO: 9790 - RNA, 20 nt, Homo sapiens
  source 1..20: mol_type = unassigned RNA
gtaggctggggaaagaggag

SEQ ID NO: 9791 - RNA, 20 nt, Homo sapiens
  source 1..20: mol_type = unassigned RNA
gaatggtaggctggggaaag

SEQ ID NO: 9792 - RNA, 20 nt, Homo sapiens
  source 1..20: mol_type = unassigned RNA
gatggctgaatggtaggctg

SEQ ID NO: 9793 - RNA, 20 nt, Homo sapiens
  source 1..20: mol_type = unassigned RNA
agatggctgaatggtaggct

SEQ ID NO: 9794 - RNA, 20 nt, Homo sapiens
  source 1..20: mol_type = unassigned RNA
cagatggctgaatggtaggc

SEQ ID NO: 9795 - RNA, 20 nt, Homo sapiens
  source 1..20: mol_type = unassigned RNA
ggcccagatggctgaatggt

SEQ ID NO: 9796 - RNA, 20 nt, Homo sapiens
  source 1..20: mol_type = unassigned RNA
cctgggcccagatggctgaa

SEQ ID NO: 9797 - RNA, 20 nt, Homo sapiens
  source 1..20: mol_type = unassigned RNA
gggccccacctgggcccaga

SEQ ID NO: 9798 - RNA, 20 nt, Homo sapiens
  source 1..20: mol_type = unassigned RNA
ccaggctcagggccccacct

SEQ ID NO: 9799 - RNA, 20 nt, Homo sapiens
  source 1..20: mol_type = unassigned RNA
gccaggctcagggccccacc

SEQ ID NO: 9800 - RNA, 20 nt, Homo sapiens
  source 1..20: mol_type = unassigned RNA
cagggcctgggccaggctca

SEQ ID NO: 9801 - RNA, 20 nt, Homo sapiens
  source 1..20: mol_type = unassigned RNA
ccagggcctgggccaggctc

SEQ ID NO: 9802 - RNA, 20 nt, Homo sapiens
  source 1..20: mol_type = unassigned RNA
atccatccagggcctgggcc

SEQ ID NO: 9803 - RNA, 20 nt, Homo sapiens
  source 1..20: mol_type = unassigned RNA
gggggatccatccagggcct

SEQ ID NO: 9804 - RNA, 20 nt, Homo sapiens
  source 1..20: mol_type = unassigned RNA
ggggggatccatccagggcc

SEQ ID NO: 9805 - RNA, 20 nt, Homo sapiens
  source 1..20: mol_type = unassigned RNA
caaatggggggatccatcca

SEQ ID NO: 9806 - RNA, 20 nt, Homo sapiens
  source 1..20: mol_type = unassigned RNA
ccaaatggggggatccatcc

SEQ ID NO: 9807 - RNA, 20 nt, Homo sapiens
  source 1..20: mol_type = unassigned RNA
cctgatctcttccaaatggg

SEQ ID NO: 9808 - RNA, 20 nt, Homo sapiens
  source 1..20: mol_type = unassigned RNA
acctgatctcttccaaatgg

SEQ ID NO: 9809 - RNA, 20 nt, Homo sapiens
  source 1..20: mol_type = unassigned RNA
tacctgatctcttccaaatg

SEQ ID NO: 9810 - RNA, 20 nt, Homo sapiens
  source 1..20: mol_type = unassigned RNA
ttacctgatctcttccaaat

SEQ ID NO: 9811 - RNA, 20 nt, Homo sapiens
  source 1..20: mol_type = unassigned RNA
cttacctgatctcttccaaa

SEQ ID NO: 9812 - RNA, 20 nt, Homo sapiens
  source 1..20: mol_type = unassigned RNA
atctcccctaccctgcagct

SEQ ID NO: 9813 - RNA, 20 nt, Homo sapiens
  source 1..20: mol_type = unassigned RNA
tcccctaccctgcagcttgg

SEQ ID NO: 9814 - RNA, 20 nt, Homo sapiens
  source 1..20: mol_type = unassigned RNA
cagcttggcggaaaacaacc

SEQ ID NO: 9815 - RNA, 20 nt, Homo sapiens
  source 1..20: mol_type = unassigned RNA
ttggcggaaaacaacctggc

SEQ ID NO: 9816 - RNA, 20 nt, Homo sapiens
  source 1..20: mol_type = unassigned RNA
gcggaaaacaacctggctgg

SEQ ID NO: 9817 - RNA, 20 nt, Homo sapiens
  source 1..20: mol_type = unassigned RNA
cggaaaacaacctggctgga

SEQ ID NO: 9818 - RNA, 20 nt, Homo sapiens
  source 1..20: mol_type = unassigned RNA
ggaaaacaacctggctggag

SEQ ID NO: 9819 - RNA, 20 nt, Homo sapiens
  source 1..20: mol_type = unassigned RNA
aggggtcctgcgtttctgta

SEQ ID NO: 9820 - RNA, 20 nt, Homo sapiens
  source 1..20: mol_type = unassigned RNA
tccgccaagctgcagggtag

SEQ ID NO: 9821 - RNA, 20 nt, Homo sapiens
  source 1..20: mol_type = unassigned RNA
ttccgccaagctgcagggta

SEQ ID NO: 9822 - RNA, 20 nt, Homo sapiens
  source 1..20: mol_type = unassigned RNA
tttccgccaagctgcagggt

SEQ ID NO: 9823 - RNA, 20 nt, Homo sapiens
  source 1..20: mol_type = unassigned RNA
ttgttttccgccaagctgca

SEQ ID NO: 9824 - RNA, 20 nt, Homo sapiens
  source 1..20: mol_type = unassigned RNA
gttgttttccgccaagctgc

SEQ ID NO: 9825 - RNA, 20 nt, Homo sapiens
  source 1..20: mol_type = unassigned RNA
aacgcaggacccctccagcc

SEQ ID NO: 9826 - RNA, 20 nt, Homo sapiens
  source 1..20: mol_type = unassigned RNA
ggagctccatacagaaacgc

SEQ ID NO: 9827 - RNA, 20 nt, Homo sapiens
  source 1..20: mol_type = unassigned RNA
actctatctgtctgagcagc

SEQ ID NO: 9828 - RNA, 20 nt, Homo sapiens
  source 1..20: mol_type = unassigned RNA
tactctatctgtctgagcag

SEQ ID NO: 9829 - RNA, 20 nt, Homo sapiens
  source 1..20: mol_type = unassigned RNA
gcccttctccatccccagcc

SEQ ID NO: 9830 - RNA, 20 nt, Homo sapiens
  source 1..20: mol_type = unassigned RNA
tgtcaatcttacaggaaacc

SEQ ID NO: 9831 - RNA, 20 nt, Homo sapiens
  source 1..20: mol_type = unassigned RNA
agtctggttgtcaatcttac

SEQ ID NO: 9832 - RNA, 20 nt, Homo sapiens
  source 1..20: mol_type = unassigned RNA
aggtgaggagcttggcagtc

SEQ ID NO: 9833 - RNA, 20 nt, Homo sapiens
  source 1..20: mol_type = unassigned RNA
gaagctggaggtgaggagct

SEQ ID NO: 9834 - RNA, 20 nt, Homo sapiens
  source 1..20: mol_type = unassigned RNA
agctcgtgaagctggaggtg

SEQ ID NO: 9835 - RNA, 20 nt, Homo sapiens
  source 1..20: mol_type = unassigned RNA
agggcagctcgtgaagctgg

SEQ ID NO: 9836 - RNA, 20 nt, Homo sapiens
  source 1..20: mol_type = unassigned RNA
ggcagggcagctcgtgaagc

SEQ ID NO: 9837 - RNA, 20 nt, Homo sapiens
  source 1..20: mol_type = unassigned RNA
tgttctaatgaagcagggca

SEQ ID NO: 9838 - RNA, 20 nt, Homo sapiens
  source 1..20: mol_type = unassigned RNA
gtgttctaatgaagcagggc

SEQ ID NO: 9839 - RNA, 20 nt, Homo sapiens
  source 1..20: mol_type = unassigned RNA
gtgagtgttctaatgaagca

SEQ ID NO: 9840 - RNA, 20 nt, Homo sapiens
  source 1..20: mol_type = unassigned RNA
agtgagtgttctaatgaagc

SEQ ID NO: 9841 - RNA, 20 nt, Homo sapiens
  source 1..20: mol_type = unassigned RNA
ccctaccctgcaggctgtcc

SEQ ID NO: 9842 - RNA, 20 nt, Homo sapiens
  source 1..20: mol_type = unassigned RNA
aggctgtcctggaatctcct

SEQ ID NO: 9843 - RNA, 20 nt, Homo sapiens
  source 1..20: mol_type = unassigned RNA
ggctgtcctggaatctcctc

SEQ ID NO: 9844 - RNA, 20 nt, Homo sapiens
  source 1..20: mol_type = unassigned RNA
gctgtcctggaatctcctcg

SEQ ID NO: 9845 - RNA, 20 nt, Homo sapiens
  source 1..20: mol_type = unassigned RNA
ctggaatctcctcggggatg

SEQ ID NO: 9846 - RNA, 20 nt, Homo sapiens
  source 1..20: mol_type = unassigned RNA
ggatgaggcagctgccgagc

SEQ ID NO: 9847 - RNA, 20 nt, Homo sapiens
  source 1..20: mol_type = unassigned RNA
ggcagctgccgagctggccc

SEQ ID NO: 9848 - RNA, 20 nt, Homo sapiens
  source 1..20: mol_type = unassigned RNA
ggcccaggtgctgccgcaga

SEQ ID NO: 9849 - RNA, 20 nt, Homo sapiens
  source 1..20: mol_type = unassigned RNA
gcccaggtgctgccgcagat

SEQ ID NO: 9850 - RNA, 20 nt, Homo sapiens
  source 1..20: mol_type = unassigned RNA
aggtgctgccgcagatgggc

SEQ ID NO: 9851 - RNA, 20 nt, Homo sapiens
  source 1..20: mol_type = unassigned RNA
gatgggccggctgaagagag

SEQ ID NO: 9852 - RNA, 20 nt, Homo sapiens
  source 1..20: mol_type = unassigned RNA
gctgaagagagtggagtatg

SEQ ID NO: 9853 - RNA, 20 nt, Homo sapiens
  source 1..20: mol_type = unassigned RNA
ctgaagagagtggagtatga

SEQ ID NO: 9854 - RNA, 20 nt, Homo sapiens
  source 1..20: mol_type = unassigned RNA
tgaagagagtggagtatgag

SEQ ID NO: 9855 - RNA, 20 nt, Homo sapiens
  source 1..20: mol_type = unassigned RNA
gagagtggagtatgaggggc

SEQ ID NO: 9856 - RNA, 20 nt, Homo sapiens
  source 1..20: mol_type = unassigned RNA
agagtggagtatgaggggcc

SEQ ID NO: 9857 - RNA, 20 nt, Homo sapiens
  source 1..20: mol_type = unassigned RNA
gagtggagtatgaggggccg

SEQ ID NO: 9858 - RNA, 20 nt, Homo sapiens
  source 1..20: mol_type = unassigned RNA
agtggagtatgaggggccgg

SEQ ID NO: 9859 - RNA, 20 nt, Homo sapiens
  source 1..20: mol_type = unassigned RNA
ggagtatgaggggccggggg

SEQ ID NO: 9860 - RNA, 20 nt, Homo sapiens
  source 1..20: mol_type = unassigned RNA
caggacagcctgcagggtag

SEQ ID NO: 9861 - RNA, 20 nt, Homo sapiens
  source 1..20: mol_type = unassigned RNA
ccaggacagcctgcagggta

SEQ ID NO: 9862 - RNA, 20 nt, Homo sapiens
  source 1..20: mol_type = unassigned RNA
tccaggacagcctgcagggt

SEQ ID NO: 9863 - RNA, 20 nt, Homo sapiens
  source 1..20: mol_type = unassigned RNA
agattccaggacagcctgca

SEQ ID NO: 9864 - RNA, 20 nt, Homo sapiens
  source 1..20: mol_type = unassigned RNA
gagattccaggacagcctgc

SEQ ID NO: 9865 - RNA, 20 nt, Homo sapiens
  source 1..20: mol_type = unassigned RNA
ctcatccccgaggagattcc

SEQ ID NO: 9866 - RNA, 20 nt, Homo sapiens
  source 1..20: mol_type = unassigned RNA
cggcagctgcctcatccccg

SEQ ID NO: 9867 - RNA, 20 nt, Homo sapiens
  source 1..20: mol_type = unassigned RNA
cggcagcacctgggccagct

SEQ ID NO: 9868 - RNA, 20 nt, Homo sapiens
  source 1..20: mol_type = unassigned RNA
gcccatctgcggcagcacct

SEQ ID NO: 9869 - RNA, 20 nt, Homo sapiens
  source 1..20: mol_type = unassigned RNA
ggcccatctgcggcagcacc

SEQ ID NO: 9870 - RNA, 20 nt, Homo sapiens
  source 1..20: mol_type = unassigned RNA
ctcttcagccggcccatctg

SEQ ID NO: 9871 - RNA, 20 nt, Homo sapiens
  source 1..20: mol_type = unassigned RNA
catactccactctcttcagc

SEQ ID NO: 9872 - RNA, 20 nt, Homo sapiens
  source 1..20: mol_type = unassigned RNA
tcactgtccactgagaagcc

SEQ ID NO: 9873 - RNA, 20 nt, Homo sapiens
  source 1..20: mol_type = unassigned RNA
gaagaatcagatcacagctt

SEQ ID NO: 9874 - RNA, 20 nt, Homo sapiens
  source 1..20: mol_type = unassigned RNA
aagaatcagatcacagcttt

SEQ ID NO: 9875 - RNA, 20 nt, Homo sapiens
  source 1..20: mol_type = unassigned RNA
agaatcagatcacagctttg

SEQ ID NO: 9876 - RNA, 20 nt, Homo sapiens
  source 1..20: mol_type = unassigned RNA
gaatcagatcacagctttgg

SEQ ID NO: 9877 - RNA, 20 nt, Homo sapiens
  source 1..20: mol_type = unassigned RNA
agatcacagctttgggggcc

SEQ ID NO: 9878 - RNA, 20 nt, Homo sapiens
  source 1..20: mol_type = unassigned RNA
agctttgggggcctggctcc

SEQ ID NO: 9879 - RNA, 20 nt, Homo sapiens
  source 1..20: mol_type = unassigned RNA
ggggcctggctcctggctga

SEQ ID NO: 9880 - RNA, 20 nt, Homo sapiens
  source 1..20: mol_type = unassigned RNA
ctggctcctggctgaaggac

SEQ ID NO: 9881 - RNA, 20 nt, Homo sapiens
  source 1..20: mol_type = unassigned RNA
cctggctgaaggactggccc

SEQ ID NO: 9882 - RNA, 20 nt, Homo sapiens
  source 1..20: mol_type = unassigned RNA
ctggctgaaggactggccca

SEQ ID NO: 9883 - RNA, 20 nt, Homo sapiens
  source 1..20: mol_type = unassigned RNA
tggctgaaggactggcccag

SEQ ID NO: 9884 - RNA, 20 nt, Homo sapiens
  source 1..20: mol_type = unassigned RNA
ggtctagcatccaagtcatc

SEQ ID NO: 9885 - RNA, 20 nt, Homo sapiens
  source 1..20: mol_type = unassigned RNA
tccaagtcatccggtaacag

SEQ ID NO: 9886 - RNA, 20 nt, Homo sapiens
  source 1..20: mol_type = unassigned RNA
atccggtaacagaggcctgc

SEQ ID NO: 9887 - RNA, 20 nt, Homo sapiens
  source 1..20: mol_type = unassigned RNA
tccggtaacagaggcctgca

SEQ ID NO: 9888 - RNA, 20 nt, Homo sapiens
  source 1..20: mol_type = unassigned RNA
ccggtaacagaggcctgcag

SEQ ID NO: 9889 - RNA, 20 nt, Homo sapiens
  source 1..20: mol_type = unassigned RNA
aggcttctcagtggacagtg

SEQ ID NO: 9890 - RNA, 20 nt, Homo sapiens
  source 1..20: mol_type = unassigned RNA
ttcttctccaggcttctcag

SEQ ID NO: 9891 - RNA, 20 nt, Homo sapiens
  source 1..20: mol_type = unassigned RNA
ctgtgatctgattcttctcc

SEQ ID NO: 9892 - RNA, 20 nt, Homo sapiens
  source 1..20: mol_type = unassigned RNA
cagtccttcagccaggagcc

SEQ ID NO: 9893 - RNA, 20 nt, Homo sapiens
  source 1..20: mol_type = unassigned RNA
cctgggccagtccttcagcc

SEQ ID NO: 9894 - RNA, 20 nt, Homo sapiens
  source 1..20: mol_type = unassigned RNA
gacttggatgctagacccct

SEQ ID NO: 9895 - RNA, 20 nt, Homo sapiens
  source 1..20: mol_type = unassigned RNA
tgacttggatgctagacccc

SEQ ID NO: 9896 - RNA, 20 nt, Homo sapiens
  source 1..20: mol_type = unassigned RNA
gcctctgttaccggatgact

SEQ ID NO: 9897 - RNA, 20 nt, Homo sapiens
  source 1..20: mol_type = unassigned RNA
cccctgcaggcctctgttac

SEQ ID NO: 9898 - RNA, 20 nt, Homo sapiens
  source 1..20: mol_type = unassigned RNA
tatctgtgccccacagcctc

SEQ ID NO: 9899 - RNA, 20 nt, Homo sapiens
  source 1..20: mol_type = unassigned RNA
taaccccattccctgcgaca

SEQ ID NO: 9900 - RNA, 20 nt, Homo sapiens
  source 1..20: mol_type = unassigned RNA
ggcccagcacctgaagagcc

SEQ ID NO: 9901 - RNA, 20 nt, Homo sapiens
  source 1..20: mol_type = unassigned RNA
acctgaagagccaggagccc

SEQ ID NO: 9902 - RNA, 20 nt, Homo sapiens
  source 1..20: mol_type = unassigned RNA
gaagagccaggagcccaggc

SEQ ID NO: 9903 - RNA, 20 nt, Homo sapiens
  source 1..20: mol_type = unassigned RNA
cttctttgacaaccagcccc

SEQ ID NO: 9904 - RNA, 20 nt, Homo sapiens
  source 1..20: mol_type = unassigned RNA
acaaccagccccaggcccct

SEQ ID NO: 9905 - RNA, 20 nt, Homo sapiens
  source 1..20: mol_type = unassigned RNA
caaccagccccaggcccctt

SEQ ID NO: 9906 - RNA, 20 nt, Homo sapiens
  source 1..20: mol_type = unassigned RNA
aaccagccccaggccccttg

SEQ ID NO: 9907 - RNA, 20 nt, Homo sapiens
  source 1..20: mol_type = unassigned RNA
aggccccttggggtacttga

SEQ ID NO: 9908 - RNA, 20 nt, Homo sapiens
  source 1..20: mol_type = unassigned RNA
gatggccccctcaagacctt

SEQ ID NO: 9909 - RNA, 20 nt, Homo sapiens
  source 1..20: mol_type = unassigned RNA
atgatccacctttcgcccac

SEQ ID NO: 9910 - RNA, 20 nt, Homo sapiens
  source 1..20: mol_type = unassigned RNA
tgatccacctttcgcccact

SEQ ID NO: 9911 - RNA, 20 nt, Homo sapiens
  source 1..20: mol_type = unassigned RNA
cccactgggataattgactc

SEQ ID NO: 9912 - RNA, 20 nt, Homo sapiens
  source 1..20: mol_type = unassigned RNA
gactcaggaaagaagagcct

SEQ ID NO: 9913 - RNA, 20 nt, Homo sapiens
  source 1..20: mol_type = unassigned RNA
caggaaagaagagcctcggc

SEQ ID NO: 9914 - RNA, 20 nt, Homo sapiens
  source 1..20: mol_type = unassigned RNA
aggaaagaagagcctcggca

SEQ ID NO: 9915 - RNA, 20 nt, Homo sapiens
  source 1..20: mol_type = unassigned RNA
gggcgctctgcactccaccc

SEQ ID NO: 9916 - RNA, 20 nt, Homo sapiens
  source 1..20: mol_type = unassigned RNA
cgctctgcactccacccagg

SEQ ID NO: 9917 - RNA, 20 nt, Homo sapiens
  source 1..20: mol_type = unassigned RNA
ctgcactccacccaggagga

SEQ ID NO: 9918 - RNA, 20 nt, Homo sapiens
  source 1..20: mol_type = unassigned RNA
tgtgtcctgctgcagtcctc

SEQ ID NO: 9919 - RNA, 20 nt, Homo sapiens
  source 1..20: mol_type = unassigned RNA
gtgtcctgctgcagtcctca

SEQ ID NO: 9920 - RNA, 20 nt, Homo sapiens
  source 1..20: mol_type = unassigned RNA
gtcctcagggagaacttttt

SEQ ID NO: 9921 - RNA, 20 nt, Homo sapiens
  source 1..20: mol_type = unassigned RNA
tcctcagggagaactttttt

SEQ ID NO: 9922 - RNA, 20 nt, Homo sapiens
  source 1..20: mol_type = unassigned RNA
ggagaacttttttgggaacc

SEQ ID NO: 9923 - RNA, 20 nt, Homo sapiens
  source 1..20: mol_type = unassigned RNA
cttttttgggaaccaggagc

SEQ ID NO: 9924 - RNA, 20 nt, Homo sapiens
  source 1..20: mol_type = unassigned RNA
ttttttgggaaccaggagct

SEQ ID NO: 9925 - RNA, 20 nt, Homo sapiens
  source 1..20: mol_type = unassigned RNA
tgggaaccaggagctgggtc

SEQ ID NO: 9926 - RNA, 20 nt, Homo sapiens
  source 1..20: mol_type = unassigned RNA
caggagctgggtctggacaa

SEQ ID NO: 9927 - RNA, 20 nt, Homo sapiens
  source 1..20: mol_type = unassigned RNA
aaggagtaccctgcattacg

SEQ ID NO: 9928 - RNA, 20 nt, Homo sapiens
  source 1..20: mol_type = unassigned RNA
aggagtaccctgcattacgt

SEQ ID NO: 9929 - RNA, 20 nt, Homo sapiens
  source 1..20: mol_type = unassigned RNA
gtgggatatgtgtgatcaat

SEQ ID NO: 9930 - RNA, 20 nt, Homo sapiens
  source 1..20: mol_type = unassigned RNA
tgggatatgtgtgatcaatt

SEQ ID NO: 9931 - RNA, 20 nt, Homo sapiens
  source 1..20: mol_type = unassigned RNA
gggatatgtgtgatcaattg

SEQ ID NO: 9932 - RNA, 20 nt, Homo sapiens
  source 1..20: mol_type = unassigned RNA
gggacatgcgacacacaatg

SEQ ID NO: 9933 - RNA, 20 nt, Homo sapiens
  source 1..20: mol_type = unassigned RNA
ggacatgcgacacacaatga

SEQ ID NO: 9934 - RNA, 20 nt, Homo sapiens
  source 1..20: mol_type = unassigned RNA
atgacaatgcatgacacgta

SEQ ID NO: 9935 - RNA, 20 nt, Homo sapiens
  source 1..20: mol_type = unassigned RNA
atgacacgtacggttatatg

SEQ ID NO: 9936 - RNA, 20 nt, Homo sapiens
  source 1..20: mol_type = unassigned RNA
cagtgtgaccccttgacatg

SEQ ID NO: 9937 - RNA, 20 nt, Homo sapiens
  source 1..20: mol_type = unassigned RNA
gcgttacatgaaagtcagtg

SEQ ID NO: 9938 - RNA, 20 nt, Homo sapiens
  source 1..20: mol_type = unassigned RNA
tcagtgtggcacgtgttctg

SEQ ID NO: 9939 - RNA, 20 nt, Homo sapiens
  source 1..20: mol_type = unassigned RNA
gtggcacgtgttctgtggca

SEQ ID NO: 9940 - RNA, 20 nt, Homo sapiens
  source 1..20: mol_type = unassigned RNA
tggcacgtgttctgtggcat

SEQ ID NO: 9941 - RNA, 20 nt, Homo sapiens
  source 1..20: mol_type = unassigned RNA
gtgttctgtggcatgggtgc

SEQ ID NO: 9942 - RNA, 20 nt, Homo sapiens
  source 1..20: mol_type = unassigned RNA
gtgctggcatcccaagtagc

SEQ ID NO: 9943 - RNA, 20 nt, Homo sapiens
  source 1..20: mol_type = unassigned RNA
gtagcaggatacatgattgt

SEQ ID NO: 9944 - RNA, 20 nt, Homo sapiens
  source 1..20: mol_type = unassigned RNA
atgacaaatgtccatgtcac

SEQ ID NO: 9945 - RNA, 20 nt, Homo sapiens
  source 1..20: mol_type = unassigned RNA
tgtccatgtcacaggactca

SEQ ID NO: 9946 - RNA, 20 nt, Homo sapiens
  source 1..20: mol_type = unassigned RNA
catgtcacaggactcatggc

SEQ ID NO: 9947 - RNA, 20 nt, Homo sapiens
  source 1..20: mol_type = unassigned RNA
atggctggccagatgacctc

SEQ ID NO: 9948 - RNA, 20 nt, Homo sapiens
  source 1..20: mol_type = unassigned RNA
ctggccagatgacctcaggc

SEQ ID NO: 9949 - RNA, 20 nt, Homo sapiens
  source 1..20: mol_type = unassigned RNA
atatttatagattgtgtgta

SEQ ID NO: 9950 - RNA, 20 nt, Homo sapiens
  source 1..20: mol_type = unassigned RNA
gtgtatggagcagctaagtc

SEQ ID NO: 9951 - RNA, 20 nt, Homo sapiens
  source 1..20: mol_type = unassigned RNA
gaaaagtcttccgcccgagc

SEQ ID NO: 9952 - RNA, 20 nt, Homo sapiens
  source 1..20: mol_type = unassigned RNA
aaaagtcttccgcccgagct

SEQ ID NO: 9953 - RNA, 20 nt, Homo sapiens
  source 1..20: mol_type = unassigned RNA
agtcttccgcccgagctggg

SEQ ID NO: 9954 - RNA, 20 nt, Homo sapiens
  source 1..20: mol_type = unassigned RNA
gtcttccgcccgagctggga

SEQ ID NO: 9955 - RNA, 20 nt, Homo sapiens
  source 1..20: mol_type = unassigned RNA
tcttccgcccgagctgggag

SEQ ID NO: 9956 - RNA, 20 nt, Homo sapiens
  source 1..20: mol_type = unassigned RNA
gtccatgcactgaccagtcc

SEQ ID NO: 9957 - RNA, 20 nt, Homo sapiens
  source 1..20: mol_type = unassigned RNA
tccatgcactgaccagtcca

SEQ ID NO: 9958 - RNA, 20 nt, Homo sapiens
  source 1..20: mol_type = unassigned RNA
ccatgcactgaccagtccag

SEQ ID NO: 9959 - RNA, 20 nt, Homo sapiens
  source 1..20: mol_type = unassigned RNA
ctgaccagtccaggggctca

SEQ ID NO: 9960 - RNA, 20 nt, Homo sapiens
  source 1..20: mol_type = unassigned RNA
tgaccagtccaggggctcaa

SEQ ID NO: 9961 - RNA, 20 nt, Homo sapiens
  source 1..20: mol_type = unassigned RNA
agtccaggggctcaagggcc

SEQ ID NO: 9962 - RNA, 20 nt, Homo sapiens
  source 1..20: mol_type = unassigned RNA
gtccaggggctcaagggcca

SEQ ID NO: 9963 - RNA, 20 nt, Homo sapiens
  source 1..20: mol_type = unassigned RNA
gggctcaagggccagggctc

SEQ ID NO: 9964 - RNA, 20 nt, Homo sapiens
  source 1..20: mol_type = unassigned RNA
ccagggctctggaacaagcc

SEQ ID NO: 9965 - RNA, 20 nt, Homo sapiens
  source 1..20: mol_type = unassigned RNA
cagggctctggaacaagcca

SEQ ID NO: 9966 - RNA, 20 nt, Homo sapiens
  source 1..20: mol_type = unassigned RNA
tacttacatactagcttcca

SEQ ID NO: 9967 - RNA, 20 nt, Homo sapiens
  source 1..20: mol_type = unassigned RNA
acatactagcttccaaggac

SEQ ID NO: 9968 - RNA, 20 nt, Homo sapiens
  source 1..20: mol_type = unassigned RNA
tactagcttccaaggacagg

SEQ ID NO: 9969 - RNA, 20 nt, Homo sapiens
  source 1..20: mol_type = unassigned RNA
tagcttccaaggacaggtgg

SEQ ID NO: 9970 - RNA, 20 nt, Homo sapiens
  source 1..20: mol_type = unassigned RNA
ttccaaggacaggtggaggt

SEQ ID NO: 9971 - RNA, 20 nt, Homo sapiens
  source 1..20: mol_type = unassigned RNA
tccaaggacaggtggaggta

SEQ ID NO: 9972 - RNA, 20 nt, Homo sapiens
  source 1..20: mol_type = unassigned RNA
aggtggaggtagggccagcc

SEQ ID NO: 9973 - RNA, 20 nt, Homo sapiens
  source 1..20: mol_type = unassigned RNA
tggaggtagggccagcctgg

SEQ ID NO: 9974 - RNA, 20 nt, Homo sapiens
  source 1..20: mol_type = unassigned RNA
ggaggtagggccagcctggc

SEQ ID NO: 9975 - RNA, 20 nt, Homo sapiens
  source 1..20: mol_type = unassigned RNA
tagggccagcctggcgggag

SEQ ID NO: 9976 - RNA, 20 nt, Homo sapiens
  source 1..20: mol_type = unassigned RNA
agcccagtctgtcctatgta

SEQ ID NO: 9977 - RNA, 20 nt, Homo sapiens
  source 1..20: mol_type = unassigned RNA
gcccagtctgtcctatgtaa

SEQ ID NO: 9978 - RNA, 20 nt, Homo sapiens
  source 1..20: mol_type = unassigned RNA
cctatgtaagggacaaagcc

SEQ ID NO: 9979 - RNA, 20 nt, Homo sapiens
  source 1..20: mol_type = unassigned RNA
agggacaaagccaggtctaa

SEQ ID NO: 9980 - RNA, 20 nt, Homo sapiens
  source 1..20: mol_type = unassigned RNA
aaagccaggtctaatggtac

SEQ ID NO: 9981 - RNA, 20 nt, Homo sapiens
  source 1..20: mol_type = unassigned RNA
aagccaggtctaatggtact

SEQ ID NO: 9982 - RNA, 20 nt, Homo sapiens
  source 1..20: mol_type = unassigned RNA
caggtctaatggtactgggt

SEQ ID NO: 9983 - RNA, 20 nt, Homo sapiens
  source 1..20: mol_type = unassigned RNA
aggtctaatggtactgggta

SEQ ID NO: 9984 - RNA, 20 nt, Homo sapiens
  source 1..20: mol_type = unassigned RNA
ggtctaatggtactgggtag

SEQ ID NO: 9985 - RNA, 20 nt, Homo sapiens
  source 1..20: mol_type = unassigned RNA
gtctaatggtactgggtagg

SEQ ID NO: 9986 - RNA, 20 nt, Homo sapiens
  source 1..20: mol_type = unassigned RNA
cactgccaagacaataagct

SEQ ID NO: 9987 - RNA, 20 nt, Homo sapiens
  source 1..20: mol_type = unassigned RNA
aagacaataagctaggctac

SEQ ID NO: 9988 - RNA, 20 nt, Homo sapiens
  source 1..20: mol_type = unassigned RNA
agacaataagctaggctact

SEQ ID NO: 9989 - RNA, 20 nt, Homo sapiens
  source 1..20: mol_type = unassigned RNA
actgggtccagctactactt

SEQ ID NO: 9990 - RNA, 20 nt, Homo sapiens
  source 1..20: mol_type = unassigned RNA
gggtccagctactactttgg

SEQ ID NO: 9991 - RNA, 20 nt, Homo sapiens
  source 1..20: mol_type = unassigned RNA
ggtccagctactactttggt

SEQ ID NO: 9992 - RNA, 20 nt, Homo sapiens
  source 1..20: mol_type = unassigned RNA
ctactactttggtgggattc

SEQ ID NO: 9993 - RNA, 20 nt, Homo sapiens
  source 1..20: mol_type = unassigned RNA
cagtgttcttgttacttcca

SEQ ID NO: 9994 - RNA, 20 nt, Homo sapiens
  source 1..20: mol_type = unassigned RNA
cttccaaggagaaccaagaa

SEQ ID NO: 9995 - RNA, 20 nt, Homo sapiens
  source 1..20: mol_type = unassigned RNA
gctctgtcacactcgaagcc

SEQ ID NO: 9996 - RNA, 20 nt, Homo sapiens
  source 1..20: mol_type = unassigned RNA
ggcttgatcaataaacacaa

SEQ ID NO: 9997 - RNA, 20 nt, Homo sapiens
  source 1..20: mol_type = unassigned RNA
aggctgtggggcacagatat

SEQ ID NO: 9998 - RNA, 20 nt, Homo sapiens
  source 1..20: mol_type = unassigned RNA
gggttattccagaggctgtg

SEQ ID NO: 9999 - RNA, 20 nt, Homo sapiens
  source 1..20: mol_type = unassigned RNA
ggggttattccagaggctgt

SEQ ID NO: 10000 - RNA, 20 nt, Homo sapiens
  source 1..20: mol_type = unassigned RNA
tggggttattccagaggctg

SEQ ID NO: 10001 - RNA, 20 nt, Homo sapiens
  source 1..20: mol_type = unassigned RNA
agggaatggggttattccag

SEQ ID NO: 10002 - RNA, 20 nt, Homo sapiens
  source 1..20: mol_type = unassigned RNA
gggccatgtcgcagggaatg

SEQ ID NO: 10003 - RNA, 20 nt, Homo sapiens
  source 1..20: mol_type = unassigned RNA
tgggccatgtcgcagggaat

SEQ ID NO: 10004 - RNA, 20 nt, Homo sapiens
  source 1..20: mol_type = unassigned RNA
ctgggccatgtcgcagggaa

SEQ ID NO: 10005 - RNA, 20 nt, Homo sapiens
  source 1..20: mol_type = unassigned RNA
aggtgctgggccatgtcgca

SEQ ID NO: 10006 - RNA, 20 nt, Homo sapiens
  source 1..20: mol_type = unassigned RNA
caggtgctgggccatgtcgc

SEQ ID NO: 10007 - RNA, 20 nt, Homo sapiens
  source 1..20: mol_type = unassigned RNA
ctcctggctcttcaggtgct

SEQ ID NO: 10008 - RNA, 20 nt, Homo sapiens
  source 1..20: mol_type = unassigned RNA
gctcctggctcttcaggtgc

SEQ ID NO: 10009 - RNA, 20 nt, Homo sapiens
  source 1..20: mol_type = unassigned RNA
gcctgggctcctggctcttc

SEQ ID NO: 10010 - RNA, 20 nt, Homo sapiens
  source 1..20: mol_type = unassigned RNA
caaagtccagcctgggctcc

SEQ ID NO: 10011 - RNA, 20 nt, Homo sapiens
  source 1..20: mol_type = unassigned RNA
aagaaggcaaagtccagcct

SEQ ID NO: 10012 - RNA, 20 nt, Homo sapiens
  source 1..20: mol_type = unassigned RNA
aaagaaggcaaagtccagcc

SEQ ID NO: 10013 - RNA, 20 nt, Homo sapiens
  source 1..20: mol_type = unassigned RNA
ctggggctggttgtcaaaga

SEQ ID NO: 10014 - RNA, 20 nt, Homo sapiens
  source 1..20: mol_type = unassigned RNA
taccccaaggggcctggggc

SEQ ID NO: 10015 - RNA, 20 nt, Homo sapiens
  source 1..20: mol_type = unassigned RNA
caagtaccccaaggggcctg

SEQ ID NO: 10016 - RNA, 20 nt, Homo sapiens
  source 1..20: mol_type = unassigned RNA
tcaagtaccccaaggggcct

SEQ ID NO: 10017 - RNA, 20 nt, Homo sapiens
  source 1..20: mol_type = unassigned RNA
atcaagtaccccaaggggcc

SEQ ID NO: 10018 - RNA, 20 nt, Homo sapiens
  source 1..20: mol_type = unassigned RNA
gggccatcaagtaccccaag

SEQ ID NO: 10019 - RNA, 20 nt, Homo sapiens
  source 1..20: mol_type = unassigned RNA
ggggccatcaagtaccccaa

SEQ ID NO: 10020 - RNA, 20 nt, Homo sapiens
  source 1..20: mol_type = unassigned RNA
gggggccatcaagtacccca

SEQ ID NO: 10021 - RNA, 20 nt, Homo sapiens
  source 1..20: mol_type = unassigned RNA
ggattccaaaggtcttgagg

SEQ ID NO: 10022 - RNA, 20 nt, Homo sapiens
  source 1..20: mol_type = unassigned RNA
tggattccaaaggtcttgag

SEQ ID NO: 10023 - RNA, 20 nt, Homo sapiens
  source 1..20: mol_type = unassigned RNA
ctggattccaaaggtcttga

SEQ ID NO: 10024 - RNA, 20 nt, Homo sapiens
  source 1..20: mol_type = unassigned RNA
gctggattccaaaggtcttg

SEQ ID NO: 10025 - RNA, 20 nt, Homo sapiens
  source 1..20: mol_type = unassigned RNA
atcacttggctggattccaa

SEQ ID NO: 10026 - RNA, 20 nt, Homo sapiens
  source 1..20: mol_type = unassigned RNA
atttgggtgcatcacttggc

SEQ ID NO: 10027 - RNA, 20 nt, Homo sapiens
  source 1..20: mol_type = unassigned RNA
gatcatttgggtgcatcact

SEQ ID NO: 10028 - RNA, 20 nt, Homo sapiens
  source 1..20: mol_type = unassigned RNA
gggcgaaaggtggatcattt

SEQ ID NO: 10029 - RNA, 20 nt, Homo sapiens
  source 1..20: mol_type = unassigned RNA
tgggcgaaaggtggatcatt

SEQ ID NO: 10030 - RNA, 20 nt, Homo sapiens
  source 1..20: mol_type = unassigned RNA
ttatcccagtgggcgaaagg

SEQ ID NO: 10031 - RNA, 20 nt, Homo sapiens
  source 1..20: mol_type = unassigned RNA
caattatcccagtgggcgaa

SEQ ID NO: 10032 - RNA, 20 nt, Homo sapiens
  source 1..20: mol_type = unassigned RNA
cctgagtcaattatcccagt

SEQ ID NO: 10033 - RNA, 20 nt, Homo sapiens
  source 1..20: mol_type = unassigned RNA
tcctgagtcaattatcccag

SEQ ID NO: 10034 - RNA, 20 nt, Homo sapiens
  source 1..20: mol_type = unassigned RNA
gagtgcagagcgccctgccg

SEQ ID NO: 10035 - RNA, 20 nt, Homo sapiens
  source 1..20: mol_type = unassigned RNA
cacgtatccttcctcctggg

SEQ ID NO: 10036 - RNA, 20 nt, Homo sapiens
  source 1..20: mol_type = unassigned RNA
acacacgtatccttcctcct

SEQ ID NO: 10037 - RNA, 20 nt, Homo sapiens
  source 1..20: mol_type = unassigned RNA
gacacacgtatccttcctcc

SEQ ID NO: 10038 - RNA, 20 nt, Homo sapiens
  source 1..20: mol_type = unassigned RNA
ttctccctgaggactgcagc

SEQ ID NO: 10039 - RNA, 20 nt, Homo sapiens
  source 1..20: mol_type = unassigned RNA
tcccaaaaaagttctccctg

SEQ ID NO: 10040 - RNA, 20 nt, Homo sapiens
  source 1..20: mol_type = unassigned RNA
ctttgtccagacccagctcc

SEQ ID NO: 10041 - RNA, 20 nt, Homo sapiens
  source 1..20: mol_type = unassigned RNA
cacatatcccacgtaatgca

SEQ ID NO: 10042 - RNA, 20 nt, Homo sapiens
  source 1..20: mol_type = unassigned RNA
acacatatcccacgtaatgc

SEQ ID NO: 10043 - RNA, 20 nt, Homo sapiens
  source 1..20: mol_type = unassigned RNA
atgtaacgccacatgtcaag

SEQ ID NO: 10044 - RNA, 20 nt, Homo sapiens
  source 1..20: mol_type = unassigned RNA
catgtaacgccacatgtcaa

SEQ ID NO: 10045 - RNA, 20 nt, Homo sapiens
  source 1..20: mol_type = unassigned RNA
tcatgtaacgccacatgtca

SEQ ID NO: 10046 - RNA, 20 nt, Homo sapiens
  source 1..20: mol_type = unassigned RNA
aatcatgtatcctgctactt

SEQ ID NO: 10047 - RNA, 20 nt, Homo sapiens
  source 1..20: mol_type = unassigned RNA
caatcatgtatcctgctact

SEQ ID NO: 10048 - RNA, 20 nt, Homo sapiens
  source 1..20: mol_type = unassigned RNA
cagccatgagtcctgtgaca

SEQ ID NO: 10049 - RNA, 20 nt, Homo sapiens
  source 1..20: mol_type = unassigned RNA
tgggccagcctgaggtcatc

SEQ ID NO: 10050 - RNA, 20 nt, Homo sapiens
  source 1..20: mol_type = unassigned RNA
ttagatcttgggccagcctg

SEQ ID NO: 10051 - RNA, 20 nt, Homo sapiens
  source 1..20: mol_type = unassigned RNA
aaattaataaattagatctt

SEQ ID NO: 10052 - RNA, 20 nt, Homo sapiens
  source 1..20: mol_type = unassigned RNA
aaaattaataaattagatct

SEQ ID NO: 10053 - RNA, 20 nt, Homo sapiens
  source 1..20: mol_type = unassigned RNA
ctctcccctcccagctcggg

SEQ ID NO: 10054 - RNA, 20 nt, Homo sapiens
  source 1..20: mol_type = unassigned RNA
acactctcccctcccagctc

SEQ ID NO: 10055 - RNA, 20 nt, Homo sapiens
  source 1..20: mol_type = unassigned RNA
gacactctcccctcccagct

SEQ ID NO: 10056 - RNA, 20 nt, Homo sapiens
  source 1..20: mol_type = unassigned RNA
cccctggactggtcagtgca

SEQ ID NO: 10057 - RNA, 20 nt, Homo sapiens
  source 1..20: mol_type = unassigned RNA
tggcccttgagcccctggac

SEQ ID NO: 10058 - RNA, 20 nt, Homo sapiens
  source 1..20: mol_type = unassigned RNA
agccctggcccttgagcccc

SEQ ID NO: 10059 - RNA, 20 nt, Homo sapiens
  source 1..20: mol_type = unassigned RNA
cctggcttgttccagagccc

SEQ ID NO: 10060 - RNA, 20 nt, Homo sapiens
  source 1..20: mol_type = unassigned RNA
ggacttaatggctgagtccc

SEQ ID NO: 10061 - RNA, 20 nt, Homo sapiens
  source 1..20: mol_type = unassigned RNA
tgaggcaggaggggacttaa

SEQ ID NO: 10062 - RNA, 20 nt, Homo sapiens
  source 1..20: mol_type = unassigned RNA
gctgaggattgaggcaggag

SEQ ID NO: 10063 - RNA, 20 nt, Homo sapiens
  source 1..20: mol_type = unassigned RNA
ggctgaggattgaggcagga

SEQ ID NO: 10064 - RNA, 20 nt, Homo sapiens
  source 1..20: mol_type = unassigned RNA
aggctgaggattgaggcagg

SEQ ID NO: 10065 - RNA, 20 nt, Homo sapiens
  source 1..20: mol_type = unassigned RNA
ggtaggctgaggattgaggc

SEQ ID NO: 10066 - RNA, 20 nt, Homo sapiens
  source 1..20: mol_type = unassigned RNA
gatgggtaggctgaggattg

SEQ ID NO: 10067 - RNA, 20 nt, Homo sapiens
  source 1..20: mol_type = unassigned RNA
gtttatagatgggtaggctg

SEQ ID NO: 10068 - RNA, 20 nt, Homo sapiens
  source 1..20: mol_type = unassigned RNA
catcaagtttatagatgggt

SEQ ID NO: 10069 - RNA, 20 nt, Homo sapiens
  source 1..20: mol_type = unassigned RNA
gagtcatcaagtttatagat

SEQ ID NO: 10070 - RNA, 20 nt, Homo sapiens
  source 1..20: mol_type = unassigned RNA
ggagtcatcaagtttataga

SEQ ID NO: 10071 - RNA, 20 nt, Homo sapiens
  source 1..20: mol_type = unassigned RNA
agctagtatgtaagtaaggg

SEQ ID NO: 10072 - RNA, 20 nt, Homo sapiens
  source 1..20: mol_type = unassigned RNA
ggaagctagtatgtaagtaa

SEQ ID NO: 10073 - RNA, 20 nt, Homo sapiens
  source 1..20: mol_type = unassigned RNA
tggaagctagtatgtaagta

SEQ ID NO: 10074 - RNA, 20 nt, Homo sapiens
  source 1..20: mol_type = unassigned RNA
gccctacctccacctgtcct

SEQ ID NO: 10075 - RNA, 20 nt, Homo sapiens
  source 1..20: mol_type = unassigned RNA
cttctccactcccgccaggc

SEQ ID NO: 10076 - RNA, 20 nt, Homo sapiens
  source 1..20: mol_type = unassigned RNA
tgggcttctccactcccgcc

SEQ ID NO: 10077 - RNA, 20 nt, Homo sapiens
  source 1..20: mol_type = unassigned RNA
tcccttacataggacagact

SEQ ID NO: 10078 - RNA, 20 nt, Homo sapiens
  source 1..20: mol_type = unassigned RNA
gtcccttacataggacagac

SEQ ID NO: 10079 - RNA, 20 nt, Homo sapiens
  source 1..20: mol_type = unassigned RNA
cctggctttgtcccttacat

SEQ ID NO: 10080 - RNA, 20 nt, Homo sapiens
  source 1..20: mol_type = unassigned RNA
ctacccagtaccattagacc

SEQ ID NO: 10081 - RNA, 20 nt, Homo sapiens
  source 1..20: mol_type = unassigned RNA
agtagcctagcttattgtct

SEQ ID NO: 10082 - RNA, 20 nt, Homo sapiens
  source 1..20: mol_type = unassigned RNA
aatcccaccaaagtagtagc

SEQ ID NO: 10083 - RNA, 20 nt, Homo sapiens
  source 1..20: mol_type = unassigned RNA
tgggtaacatgtgaagtgca

SEQ ID NO: 10084 - RNA, 20 nt, Homo sapiens
  source 1..20: mol_type = unassigned RNA
ttggaagtaacaagaacact

SEQ ID NO: 10085 - RNA, 20 nt, Homo sapiens
  source 1..20: mol_type = unassigned RNA
cttggaagtaacaagaacac

SEQ ID NO: 10086 - RNA, 20 nt, Homo sapiens
  source 1..20: mol_type = unassigned RNA
gagccattcttggttctcct

SEQ ID NO: 10087 - RNA, 20 nt, Homo sapiens
  source 1..20: mol_type = unassigned RNA
gagtgtgacagagccattct

SEQ ID NO: 10088 - RNA, 20 nt, Homo sapiens
  source 1..20: mol_type = unassigned RNA
ttgtgtttattgatcaagcc

SEQ ID NO: 10089 - RNA, 20 nt, Homo sapiens
  source 1..20: mol_type = unassigned RNA
cattggattcacgctagacg

SEQ ID NO: 10090 - RNA, 20 nt, Homo sapiens
  source 1..20: mol_type = unassigned RNA
taaaaaggggaagttaagag

SEQ ID NO: 10091 - RNA, 20 nt, Homo sapiens
  source 1..20: mol_type = unassigned RNA
gaagttaagaggggactatt

SEQ ID NO: 10092 - RNA, 20 nt, Homo sapiens
  source 1..20: mol_type = unassigned RNA
ctgccacacgcagctcagcc

SEQ ID NO: 10093 - RNA, 20 nt, Homo sapiens
  source 1..20: mol_type = unassigned RNA
tgccacacgcagctcagcct

SEQ ID NO: 10094 - RNA, 20 nt, Homo sapiens
  source 1..20: mol_type = unassigned RNA
cacacgcagctcagcctggg

SEQ ID NO: 10095 - RNA, 20 nt, Homo sapiens
  source 1..20: mol_type = unassigned RNA
atctgagtctgcctgcagca

SEQ ID NO: 10096 - RNA, 20 nt, Homo sapiens
  source 1..20: mol_type = unassigned RNA
gtctgcctgcagcatggacc

SEQ ID NO: 10097 - RNA, 20 nt, Homo sapiens
  source 1..20: mol_type = unassigned RNA
tctgcctgcagcatggacct

SEQ ID NO: 10098 - RNA, 20 nt, Homo sapiens
  source 1..20: mol_type = unassigned RNA
gtcttccctgaagcatctcc

SEQ ID NO: 10099 - RNA, 20 nt, Homo sapiens
  source 1..20: mol_type = unassigned RNA
tcttccctgaagcatctcca

SEQ ID NO: 10100 - RNA, 20 nt, Homo sapiens
  source 1..20: mol_type = unassigned RNA
ccctgaagcatctccagggc

SEQ ID NO: 10101 - RNA, 20 nt, Homo sapiens
  source 1..20: mol_type = unassigned RNA
tgaagcatctccagggctgg

SEQ ID NO: 10102 - RNA, 20 nt, Homo sapiens
  source 1..20: mol_type = unassigned RNA
gaagcatctccagggctgga

SEQ ID NO: 10103 - RNA, 20 nt, Homo sapiens
  source 1..20: mol_type = unassigned RNA
ggctggagggacgactgcca

SEQ ID NO: 10104 - RNA, 20 nt, Homo sapiens
  source 1..20: mol_type = unassigned RNA
gagggacgactgccatggta

SEQ ID NO: 10105 - RNA, 20 nt, Homo sapiens
  source 1..20: mol_type = unassigned RNA
ctttcttgacactggattgt

SEQ ID NO: 10106 - RNA, 20 nt, Homo sapiens
  source 1..20: mol_type = unassigned RNA
tctttcttgacactggattg

SEQ ID NO: 10107 - RNA, 20 nt, Homo sapiens
  source 1..20: mol_type = unassigned RNA
gttgacttctttcttgacac

SEQ ID NO: 10108 - RNA, 20 nt, Homo sapiens
  source 1..20: mol_type = unassigned RNA
aagagaaatgcagggaaata

SEQ ID NO: 10109 - RNA, 20 nt, Homo sapiens
  source 1..20: mol_type = unassigned RNA
gaagagaaatgcagggaaat

SEQ ID NO: 10110 - RNA, 20 nt, Homo sapiens
  source 1..20: mol_type = unassigned RNA
gagcacagaagagaaatgca

SEQ ID NO: 10111 - RNA, 20 nt, Homo sapiens
  source 1..20: mol_type = unassigned RNA
tgagcacagaagagaaatgc

SEQ ID NO: 10112 - RNA, 20 nt, Homo sapiens
  source 1..20: mol_type = unassigned RNA
cgcccaggctgagctgcgtg

SEQ ID NO: 10113 - RNA, 20 nt, Homo sapiens
  source 1..20: mol_type = unassigned RNA
cgcatctggctgtgccgccc

SEQ ID NO: 10114 - RNA, 20 nt, Homo sapiens
  source 1..20: mol_type = unassigned RNA
gcagagacgcatctcgcatc

SEQ ID NO: 10115 - RNA, 20 nt, Homo sapiens
  source 1..20: mol_type = unassigned RNA
aagacccaggtccatgctgc

SEQ ID NO: 10116 - RNA, 20 nt, Homo sapiens
  source 1..20: mol_type = unassigned RNA
agatgcttcagggaagaccc

SEQ ID NO: 10117 - RNA, 20 nt, Homo sapiens
  source 1..20: mol_type = unassigned RNA
ccagccctggagatgcttca

SEQ ID NO: 10118 - RNA, 20 nt, Homo sapiens
  source 1..20: mol_type = unassigned RNA
tccagccctggagatgcttc

SEQ ID NO: 10119 - RNA, 20 nt, Homo sapiens
  source 1..20: mol_type = unassigned RNA
ggcagtcgtccctccagccc

SEQ ID NO: 10120 - RNA, 20 nt, Homo sapiens
  source 1..20: mol_type = unassigned RNA
gtgttgtggggtccttacca

SEQ ID NO: 10121 - RNA, 20 nt, Homo sapiens
  source 1..20: mol_type = unassigned RNA
tctctatcctgccagcaccg

SEQ ID NO: 10122 - RNA, 20 nt, Homo sapiens
  source 1..20: mol_type = unassigned RNA
ctctatcctgccagcaccga

SEQ ID NO: 10123 - RNA, 20 nt, Homo sapiens
  source 1..20: mol_type = unassigned RNA
ggctcatccatccacagagc

SEQ ID NO: 10124 - RNA, 20 nt, Homo sapiens
  source 1..20: mol_type = unassigned RNA
gctcatccatccacagagca

SEQ ID NO: 10125 - RNA, 20 nt, Homo sapiens
  source 1..20: mol_type = unassigned RNA
ccatccacagagcagggcag

SEQ ID NO: 10126 - RNA, 20 nt, Homo sapiens
  source 1..20: mol_type = unassigned RNA
catccacagagcagggcagt

SEQ ID NO: 10127 - RNA, 20 nt, Homo sapiens
  source 1..20: mol_type = unassigned RNA
ccacagagcagggcagtggg

SEQ ID NO: 10128 - RNA, 20 nt, Homo sapiens
  source 1..20: mol_type = unassigned RNA
cgccatgacccccatcctca

SEQ ID NO: 10129 - RNA, 20 nt, Homo sapiens
  source 1..20: mol_type = unassigned RNA
ctcacggtcctgatctgtct

SEQ ID NO: 10130 - RNA, 20 nt, Homo sapiens
  source 1..20: mol_type = unassigned RNA
gtctcggtgagatttgaaga

SEQ ID NO: 10131 - RNA, 20 nt, Homo sapiens
  source 1..20: mol_type = unassigned RNA
tcggtgagatttgaagaagg

SEQ ID NO: 10132 - RNA, 20 nt, Homo sapiens
  source 1..20: mol_type = unassigned RNA
gatgagccctcggtgctggc

SEQ ID NO: 10133 - RNA, 20 nt, Homo sapiens
  source 1..20: mol_type = unassigned RNA
gatggatgagccctcggtgc

SEQ ID NO: 10134 - RNA, 20 nt, Homo sapiens
  source 1..20: mol_type = unassigned RNA
tctgtggatggatgagccct

SEQ ID NO: 10135 - RNA, 20 nt, Homo sapiens
  source 1..20: mol_type = unassigned RNA
ccactgccctgctctgtgga

SEQ ID NO: 10136 - RNA, 20 nt, Homo sapiens
  source 1..20: mol_type = unassigned RNA
cctcccactgccctgctctg

SEQ ID NO: 10137 - RNA, 20 nt, Homo sapiens
  source 1..20: mol_type = unassigned RNA
gaccgtgaggatgggggtca

SEQ ID NO: 10138 - RNA, 20 nt, Homo sapiens
  source 1..20: mol_type = unassigned RNA
gatcaggaccgtgaggatgg

SEQ ID NO: 10139 - RNA, 20 nt, Homo sapiens
  source 1..20: mol_type = unassigned RNA
agatcaggaccgtgaggatg

SEQ ID NO: 10140 - RNA, 20 nt, Homo sapiens
  source 1..20: mol_type = unassigned RNA
cagatcaggaccgtgaggat

SEQ ID NO: 10141 - RNA, 20 nt, Homo sapiens
  source 1..20: mol_type = unassigned RNA
acagatcaggaccgtgagga

SEQ ID NO: 10142 - RNA, 20 nt, Homo sapiens
  source 1..20: mol_type = unassigned RNA
cgagacagatcaggaccgtg

SEQ ID NO: 10143 - RNA, 20 nt, Homo sapiens
  source 1..20: mol_type = unassigned RNA
aaatctcaccgagacagatc

SEQ ID NO: 10144 - RNA, 20 nt, Homo sapiens
  source 1..20: mol_type = unassigned RNA
ctctcttccagggctgagtc

SEQ ID NO: 10145 - RNA, 20 nt, Homo sapiens
  source 1..20: mol_type = unassigned RNA
tctcttccagggctgagtct

SEQ ID NO: 10146 - RNA, 20 nt, Homo sapiens
  source 1..20: mol_type = unassigned RNA
cagggctgagtctgggcccc

SEQ ID NO: 10147 - RNA, 20 nt, Homo sapiens
  source 1..20: mol_type = unassigned RNA
gggcccccggacccacgtgc

SEQ ID NO: 10148 - RNA, 20 nt, Homo sapiens
  source 1..20: mol_type = unassigned RNA
ccccggacccacgtgcaggc

SEQ ID NO: 10149 - RNA, 20 nt, Homo sapiens
  source 1..20: mol_type = unassigned RNA
cagccctggaagagagttcc

SEQ ID NO: 10150 - RNA, 20 nt, Homo sapiens
  source 1..20: mol_type = unassigned RNA
cgggggcccagactcagccc

SEQ ID NO: 10151 - RNA, 20 nt, Homo sapiens
  source 1..20: mol_type = unassigned RNA
ctgcctgcacgtgggtccgg

SEQ ID NO: 10152 - RNA, 20 nt, Homo sapiens
  source 1..20: mol_type = unassigned RNA
cctgcctgcacgtgggtccg

SEQ ID NO: 10153 - RNA, 20 nt, Homo sapiens
  source 1..20: mol_type = unassigned RNA
acctgcctgcacgtgggtcc

SEQ ID NO: 10154 - RNA, 20 nt, Homo sapiens
  source 1..20: mol_type = unassigned RNA
cacctgcctgcacgtgggtc

SEQ ID NO: 10155 - RNA, 20 nt, Homo sapiens
  source 1..20: mol_type = unassigned RNA
agactcacctgcctgcacgt

SEQ ID NO: 10156 - RNA, 20 nt, Homo sapiens
  source 1..20: mol_type = unassigned RNA
cagactcacctgcctgcacg

SEQ ID NO: 10157 - RNA, 20 nt, Homo sapiens
  source 1..20: mol_type = unassigned RNA
acctccccaagcccaccctc

SEQ ID NO: 10158 - RNA, 20 nt, Homo sapiens
  source 1..20: mol_type = unassigned RNA
cctccccaagcccaccctct

SEQ ID NO: 10159 - RNA, 20 nt, Homo sapiens
  source 1..20: mol_type = unassigned RNA
cccaccctctgggctgaacc

SEQ ID NO: 10160 - RNA, 20 nt, Homo sapiens
  source 1..20: mol_type = unassigned RNA
accaggctctgtgatcaccc

SEQ ID NO: 10161 - RNA, 20 nt, Homo sapiens
  source 1..20: mol_type = unassigned RNA
ccaggctctgtgatcaccca

SEQ ID NO: 10162 - RNA, 20 nt, Homo sapiens
  source 1..20: mol_type = unassigned RNA
caggctctgtgatcacccag

SEQ ID NO: 10163 - RNA, 20 nt, Homo sapiens
  source 1..20: mol_type = unassigned RNA
aggggagtcctgtgaccctc

SEQ ID NO: 10164 - RNA, 20 nt, Homo sapiens
  source 1..20: mol_type = unassigned RNA
tcctgtgaccctcaggtgtc

SEQ ID NO: 10165 - RNA, 20 nt, Homo sapiens
  source 1..20: mol_type = unassigned RNA
cctgtgaccctcaggtgtca

SEQ ID NO: 10166 - RNA, 20 nt, Homo sapiens
  source 1..20: mol_type = unassigned RNA
ctgtgaccctcaggtgtcag

SEQ ID NO: 10167 - RNA, 20 nt, Homo sapiens
  source 1..20: mol_type = unassigned RNA
tgtgaccctcaggtgtcagg

SEQ ID NO: 10168 - RNA, 20 nt, Homo sapiens
  source 1..20: mol_type = unassigned RNA
gtgaccctcaggtgtcaggg

SEQ ID NO: 10169 - RNA, 20 nt, Homo sapiens
  source 1..20: mol_type = unassigned RNA
cctcaggtgtcaggggggcc

SEQ ID NO: 10170 - RNA, 20 nt, Homo sapiens
  source 1..20: mol_type = unassigned RNA
tcaggggggccaggagaccc

SEQ ID NO: 10171 - RNA, 20 nt, Homo sapiens
  source 1..20: mol_type = unassigned RNA
gagaaaagaaaacagcaccc

SEQ ID NO: 10172 - RNA, 20 nt, Homo sapiens
  source 1..20: mol_type = unassigned RNA
aaacagcaccctggattaca

SEQ ID NO: 10173 - RNA, 20 nt, Homo sapiens
  source 1..20: mol_type = unassigned RNA
ctggattacacggatcccac

SEQ ID NO: 10174 - RNA, 20 nt, Homo sapiens
  source 1..20: mol_type = unassigned RNA
cccacaggagcttgtgaaga

SEQ ID NO: 10175 - RNA, 20 nt, Homo sapiens
  source 1..20: mol_type = unassigned RNA
ccacaggagcttgtgaagaa

SEQ ID NO: 10176 - RNA, 20 nt, Homo sapiens
  source 1..20: mol_type = unassigned RNA
tccccatcccatccatcacc

SEQ ID NO: 10177 - RNA, 20 nt, Homo sapiens
  source 1..20: mol_type = unassigned RNA
ccccatcccatccatcacct

SEQ ID NO: 10178 - RNA, 20 nt, Homo sapiens
  source 1..20: mol_type = unassigned RNA
tccatcacctgggaacacac

SEQ ID NO: 10179 - RNA, 20 nt, Homo sapiens
  source 1..20: mol_type = unassigned RNA
ccatcacctgggaacacaca

SEQ ID NO: 10180 - RNA, 20 nt, Homo sapiens
  source 1..20: mol_type = unassigned RNA
tcacctgggaacacacaggg

SEQ ID NO: 10181 - RNA, 20 nt, Homo sapiens
  source 1..20: mol_type = unassigned RNA
gggcggtatcgctgttacta

SEQ ID NO: 10182 - RNA, 20 nt, Homo sapiens
  source 1..20: mol_type = unassigned RNA
tactatggtagcgacactgc

SEQ ID NO: 10183 - RNA, 20 nt, Homo sapiens
  source 1..20: mol_type = unassigned RNA
ctcagagagcagtgaccccc

SEQ ID NO: 10184 - RNA, 20 nt, Homo sapiens
  source 1..20: mol_type = unassigned RNA
gagcagtgaccccctggagc

SEQ ID NO: 10185 - RNA, 20 nt, Homo sapiens
  source 1..20: mol_type = unassigned RNA
cagtgaccccctggagctgg

SEQ ID NO: 10186 - RNA, 20 nt, Homo sapiens
  source 1..20: mol_type = unassigned RNA
cccctggagctggtggtgac

SEQ ID NO: 10187 - RNA, 20 nt, Homo sapiens
  source 1..20: mol_type = unassigned RNA
tgacaggtgagctgacactc

SEQ ID NO: 10188 - RNA, 20 nt, Homo sapiens
  source 1..20: mol_type = unassigned RNA
gacaggtgagctgacactca

SEQ ID NO: 10189 - RNA, 20 nt, Homo sapiens
  source 1..20: mol_type = unassigned RNA
acaggtgagctgacactcag

SEQ ID NO: 10190 - RNA, 20 nt, Homo sapiens
  source 1..20: mol_type = unassigned RNA
aggtgccctggaaggaaatc

SEQ ID NO: 10191 - RNA, 20 nt, Homo sapiens
  source 1..20: mol_type = unassigned RNA
gcttggggaggtgccctgga

SEQ ID NO: 10192 - RNA, 20 nt, Homo sapiens
  source 1..20: mol_type = unassigned RNA
gtgggcttggggaggtgccc

SEQ ID NO: 10193 - RNA, 20 nt, Homo sapiens
  source 1..20: mol_type = unassigned RNA
cccagagggtgggcttgggg

SEQ ID NO: 10194 - RNA, 20 nt, Homo sapiens
  source 1..20: mol_type = unassigned RNA
cagcccagagggtgggcttg

SEQ ID NO: 10195 - RNA, 20 nt, Homo sapiens
  source 1..20: mol_type = unassigned RNA
tcagcccagagggtgggctt

SEQ ID NO: 10196 - RNA, 20 nt, Homo sapiens
  source 1..20: mol_type = unassigned RNA
ttcagcccagagggtgggct

SEQ ID NO: 10197 - RNA, 20 nt, Homo sapiens
  source 1..20: mol_type = unassigned RNA
cctggttcagcccagagggt

SEQ ID NO: 10198 - RNA, 20 nt, Homo sapiens
  source 1..20: mol_type = unassigned RNA
gcctggttcagcccagaggg

SEQ ID NO: 10199 - RNA, 20 nt, Homo sapiens
  source 1..20: mol_type = unassigned RNA
agagcctggttcagcccaga

SEQ ID NO: 10200 - RNA, 20 nt, Homo sapiens
  source 1..20: mol_type = unassigned RNA
cagagcctggttcagcccag

SEQ ID NO: 10201 - RNA, 20 nt, Homo sapiens
  source 1..20: mol_type = unassigned RNA
ccctgggtgatcacagagcc

SEQ ID NO: 10202 - RNA, 20 nt, Homo sapiens
  source 1..20: mol_type = unassigned RNA
gagggtcacaggactcccct

SEQ ID NO: 10203 - RNA, 20 nt, Homo sapiens
  source 1..20: mol_type = unassigned RNA
tgagggtcacaggactcccc

SEQ ID NO: 10204 - RNA, 20 nt, Homo sapiens
  source 1..20: mol_type = unassigned RNA
ccctgacacctgagggtcac

SEQ ID NO: 10205 - RNA, 20 nt, Homo sapiens
  source 1..20: mol_type = unassigned RNA
ctggcccccctgacacctga

SEQ ID NO: 10206 - RNA, 20 nt, Homo sapiens
  source 1..20: mol_type = unassigned RNA
cctggcccccctgacacctg

SEQ ID NO: 10207 - RNA, 20 nt, Homo sapiens
  source 1..20: mol_type = unassigned RNA
gacggtactcctgggtctcc

SEQ ID NO: 10208 - RNA, 20 nt, Homo sapiens
  source 1..20: mol_type = unassigned RNA
tctatatagacggtactcct

SEQ ID NO: 10209 - RNA, 20 nt, Homo sapiens
  source 1..20: mol_type = unassigned RNA
ctctatatagacggtactcc

SEQ ID NO: 10210 - RNA, 20 nt, Homo sapiens
  source 1..20: mol_type = unassigned RNA
ttttcttttctctatataga

SEQ ID NO: 10211 - RNA, 20 nt, Homo sapiens
  source 1..20: mol_type = unassigned RNA
tgtgggatccgtgtaatcca

SEQ ID NO: 10212 - RNA, 20 nt, Homo sapiens
  source 1..20: mol_type = unassigned RNA
ctgtgggatccgtgtaatcc

SEQ ID NO: 10213 - RNA, 20 nt, Homo sapiens
  source 1..20: mol_type = unassigned RNA
ccttcttcacaagctcctgt

SEQ ID NO: 10214 - RNA, 20 nt, Homo sapiens
  source 1..20: mol_type = unassigned RNA
cccttcttcacaagctcctg

SEQ ID NO: 10215 - RNA, 20 nt, Homo sapiens
  source 1..20: mol_type = unassigned RNA
tgatggatgggatggggaac

SEQ ID NO: 10216 - RNA, 20 nt, Homo sapiens
  source 1..20: mol_type = unassigned RNA
cccaggtgatggatgggatg

SEQ ID NO: 10217 - RNA, 20 nt, Homo sapiens
  source 1..20: mol_type = unassigned RNA
tcccaggtgatggatgggat

SEQ ID NO: 10218 - RNA, 20 nt, Homo sapiens
  source 1..20: mol_type = unassigned RNA
ttcccaggtgatggatggga

SEQ ID NO: 10219 - RNA, 20 nt, Homo sapiens
  source 1..20: mol_type = unassigned RNA
tgtgttcccaggtgatggat

SEQ ID NO: 10220 - RNA, 20 nt, Homo sapiens
  source 1..20: mol_type = unassigned RNA
gtgtgttcccaggtgatgga

SEQ ID NO: 10221 - RNA, 20 nt, Homo sapiens
  source 1..20: mol_type = unassigned RNA
ccctgtgtgttcccaggtga

SEQ ID NO: 10222 - RNA, 20 nt, Homo sapiens
  source 1..20: mol_type = unassigned RNA
ataccgccctgtgtgttccc

SEQ ID NO: 10223 - RNA, 20 nt, Homo sapiens
  source 1..20: mol_type = unassigned RNA
gggggtcactgctctctgag

SEQ ID NO: 10224 - RNA, 20 nt, Homo sapiens
  source 1..20: mol_type = unassigned RNA
ctgtcaccaccagctccagg

SEQ ID NO: 10225 - RNA, 20 nt, Homo sapiens
  source 1..20: mol_type = unassigned RNA
cctgtcaccaccagctccag

SEQ ID NO: 10226 - RNA, 20 nt, Homo sapiens
  source 1..20: mol_type = unassigned RNA
acctgtcaccaccagctcca

SEQ ID NO: 10227 - RNA, 20 nt, Homo sapiens
  source 1..20: mol_type = unassigned RNA
cacctgtcaccaccagctcc

SEQ ID NO: 10228 - RNA, 20 nt, Homo sapiens
  source 1..20: mol_type = unassigned RNA
ctcagcccagcccagccccg

SEQ ID NO: 10229 - RNA, 20 nt, Homo sapiens
  source 1..20: mol_type = unassigned RNA
cccagccccgtggtgaactc

SEQ ID NO: 10230 - RNA, 20 nt, Homo sapiens
  source 1..20: mol_type = unassigned RNA
agccccgtggtgaactcagg

SEQ ID NO: 10231 - RNA, 20 nt, Homo sapiens
  source 1..20: mol_type = unassigned RNA
gccccgtggtgaactcagga

SEQ ID NO: 10232 - RNA, 20 nt, Homo sapiens
  source 1..20: mol_type = unassigned RNA
aaccctccagtgtgactcac

SEQ ID NO: 10233 - RNA, 20 nt, Homo sapiens
  source 1..20: mol_type = unassigned RNA
cctccagtgtgactcacagg

SEQ ID NO: 10234 - RNA, 20 nt, Homo sapiens
  source 1..20: mol_type = unassigned RNA
gactcacaggtggcatttga

SEQ ID NO: 10235 - RNA, 20 nt, Homo sapiens
  source 1..20: mol_type = unassigned RNA
tgatggcttcattctgtgta

SEQ ID NO: 10236 - RNA, 20 nt, Homo sapiens
  source 1..20: mol_type = unassigned RNA
ggcttcattctgtgtaagga

SEQ ID NO: 10237 - RNA, 20 nt, Homo sapiens
  source 1..20: mol_type = unassigned RNA
aactcccagccccatgcccg

SEQ ID NO: 10238 - RNA, 20 nt, Homo sapiens
  source 1..20: mol_type = unassigned RNA
actcccagccccatgcccgt

SEQ ID NO: 10239 - RNA, 20 nt, Homo sapiens
  source 1..20: mol_type = unassigned RNA
gtcccgcgccatcttctccg

SEQ ID NO: 10240 - RNA, 20 nt, Homo sapiens
  source 1..20: mol_type = unassigned RNA
tcccgcgccatcttctccgt

SEQ ID NO: 10241 - RNA, 20 nt, Homo sapiens
  source 1..20: mol_type = unassigned RNA
gccccgtgagcccgagtcgc

SEQ ID NO: 10242 - RNA, 20 nt, Homo sapiens
  source 1..20: mol_type = unassigned RNA
ccgtgagcccgagtcgcagg

SEQ ID NO: 10243 - RNA, 20 nt, Homo sapiens
  source 1..20: mol_type = unassigned RNA
tgagcccgagtcgcaggtgg

SEQ ID NO: 10244 - RNA, 20 nt, Homo sapiens
  source 1..20: mol_type = unassigned RNA
cgagtcgcaggtggtggtac

SEQ ID NO: 10245 - RNA, 20 nt, Homo sapiens
  source 1..20: mol_type = unassigned RNA
actcgaactctccctatgag

SEQ ID NO: 10246 - RNA, 20 nt, Homo sapiens
  source 1..20: mol_type = unassigned RNA
gtctctacccagtgatctcc

SEQ ID NO: 10247 - RNA, 20 nt, Homo sapiens
  source 1..20: mol_type = unassigned RNA
cagtgatctcctggagctcc

SEQ ID NO: 10248 - RNA, 20 nt, Homo sapiens
  source 1..20: mol_type = unassigned RNA
ctcctggagctcctggtcct

SEQ ID NO: 10249 - RNA, 20 nt, Homo sapiens
  source 1..20: mol_type = unassigned RNA
taggctcctaggagagaagg

SEQ ID NO: 10250 - RNA, 20 nt, Homo sapiens
  source 1..20: mol_type = unassigned RNA
atgtaggctcctaggagaga

SEQ ID NO: 10251 - RNA, 20 nt, Homo sapiens
  source 1..20: mol_type = unassigned RNA
tgggtttgatgtaggctcct

SEQ ID NO: 10252 - RNA, 20 nt, Homo sapiens
  source 1..20: mol_type = unassigned RNA
tgagagggtgggtttgatgt

SEQ ID NO: 10253 - RNA, 20 nt, Homo sapiens
  source 1..20: mol_type = unassigned RNA
ctgggctgggctgagagggt

SEQ ID NO: 10254 - RNA, 20 nt, Homo sapiens
  source 1..20: mol_type = unassigned RNA
gctgggctgggctgagaggg

SEQ ID NO: 10255 - RNA, 20 nt, Homo sapiens
  source 1..20: mol_type = unassigned RNA
ggggctgggctgggctgaga

SEQ ID NO: 10256 - RNA, 20 nt, Homo sapiens
  source 1..20: mol_type = unassigned RNA
cggggctgggctgggctgag

SEQ ID NO: 10257 - RNA, 20 nt, Homo sapiens
  source 1..20: mol_type = unassigned RNA
gttcaccacggggctgggct

SEQ ID NO: 10258 - RNA, 20 nt, Homo sapiens
  source 1..20: mol_type = unassigned RNA
agttcaccacggggctgggc

SEQ ID NO: 10259 - RNA, 20 nt, Homo sapiens
  source 1..20: mol_type = unassigned RNA
cctgagttcaccacggggct

SEQ ID NO: 10260 - RNA, 20 nt, Homo sapiens
  source 1..20: mol_type = unassigned RNA
tcctgagttcaccacggggc

SEQ ID NO: 10261 - RNA, 20 nt, Homo sapiens
  source 1..20: mol_type = unassigned RNA
tccctcctgagttcaccacg

SEQ ID NO: 10262 - RNA, 20 nt, Homo sapiens
  source 1..20: mol_type = unassigned RNA
ttccctcctgagttcaccac

SEQ ID NO: 10263 - RNA, 20 nt, Homo sapiens
  source 1..20: mol_type = unassigned RNA
attccctcctgagttcacca

SEQ ID NO: 10264 - RNA, 20 nt, Homo sapiens
  source 1..20: mol_type = unassigned RNA
cacctgtgagtcacactgga

SEQ ID NO: 10265 - RNA, 20 nt, Homo sapiens
  source 1..20: mol_type = unassigned RNA
ccacctgtgagtcacactgg

SEQ ID NO: 10266 - RNA, 20 nt, Homo sapiens
  source 1..20: mol_type = unassigned RNA
atgccacctgtgagtcacac

SEQ ID NO: 10267 - RNA, 20 nt, Homo sapiens
  source 1..20: mol_type = unassigned RNA
gctgggagttcaggcattgt

SEQ ID NO: 10268 - RNA, 20 nt, Homo sapiens
  source 1..20: mol_type = unassigned RNA
ggctgggagttcaggcattg

SEQ ID NO: 10269 - RNA, 20 nt, Homo sapiens
  source 1..20: mol_type = unassigned RNA
gggcatggggctgggagttc

SEQ ID NO: 10270 - RNA, 20 nt, Homo sapiens
  source 1..20: mol_type = unassigned RNA
cgacccacgggcatggggct

SEQ ID NO: 10271 - RNA, 20 nt, Homo sapiens
  source 1..20: mol_type = unassigned RNA
acgacccacgggcatggggc

SEQ ID NO: 10272 - RNA, 20 nt, Homo sapiens
  source 1..20: mol_type = unassigned RNA
cgggacgacccacgggcatg

SEQ ID NO: 10273 - RNA, 20 nt, Homo sapiens
  source 1..20: mol_type = unassigned RNA
gcgggacgacccacgggcat

SEQ ID NO: 10274 - RNA, 20 nt, Homo sapiens
  source 1..20: mol_type = unassigned RNA
cgcgggacgacccacgggca

SEQ ID NO: 10275 - RNA, 20 nt, Homo sapiens
  source 1..20: mol_type = unassigned RNA
gatggcgcgggacgacccac

SEQ ID NO: 10276 - RNA, 20 nt, Homo sapiens
  source 1..20: mol_type = unassigned RNA
agatggcgcgggacgaccca

SEQ ID NO: 10277 - RNA, 20 nt, Homo sapiens
  source 1..20: mol_type = unassigned RNA
gcccacggagaagatggcgc

SEQ ID NO: 10278 - RNA, 20 nt, Homo sapiens
  source 1..20: mol_type = unassigned RNA
ggcccacggagaagatggcg

SEQ ID NO: 10279 - RNA, 20 nt, Homo sapiens
  source 1..20: mol_type = unassigned RNA
cacggggcccacggagaaga

SEQ ID NO: 10280 - RNA, 20 nt, Homo sapiens
  source 1..20: mol_type = unassigned RNA
actcgggctcacggggccca

SEQ ID NO: 10281 - RNA, 20 nt, Homo sapiens
  source 1..20: mol_type = unassigned RNA
acctgcgactcgggctcacg

SEQ ID NO: 10282 - RNA, 20 nt, Homo sapiens
  source 1..20: mol_type = unassigned RNA
cacctgcgactcgggctcac

SEQ ID NO: 10283 - RNA, 20 nt, Homo sapiens
  source 1..20: mol_type = unassigned RNA
ccacctgcgactcgggctca

SEQ ID NO: 10284 - RNA, 20 nt, Homo sapiens
  source 1..20: mol_type = unassigned RNA
tgtaccaccacctgcgactc

SEQ ID NO: 10285 - RNA, 20 nt, Homo sapiens
  source 1..20: mol_type = unassigned RNA
ctgtaccaccacctgcgact

SEQ ID NO: 10286 - RNA, 20 nt, Homo sapiens
  source 1..20: mol_type = unassigned RNA
ctgggtagagaccactcata

SEQ ID NO: 10287 - RNA, 20 nt, Homo sapiens
  source 1..20: mol_type = unassigned RNA
actgggtagagaccactcat

SEQ ID NO: 10288 - RNA, 20 nt, Homo sapiens
  source 1..20: mol_type = unassigned RNA
aggagctccaggagatcact

SEQ ID NO: 10289 - RNA, 20 nt, Homo sapiens
  source 1..20: mol_type = unassigned RNA
caggagctccaggagatcac

SEQ ID NO: 10290 - RNA, 20 nt, Homo sapiens
  source 1..20: mol_type = unassigned RNA
cacctaggaccaggagctcc

SEQ ID NO: 10291 - RNA, 20 nt, Homo sapiens
  source 1..20: mol_type = unassigned RNA
tgaatttctcacctaggacc

SEQ ID NO: 10292 - RNA, 20 nt, Homo sapiens
  source 1..20: mol_type = unassigned RNA
atgctgtgaatttctcacct

SEQ ID NO: 10293 - RNA, 20 nt, Homo sapiens
  source 1..20: mol_type = unassigned RNA
ccatcactctcagtgcagcc

SEQ ID NO: 10294 - RNA, 20 nt, Homo sapiens
  source 1..20: mol_type = unassigned RNA
agtgcagccaggtcctatcg

SEQ ID NO: 10295 - RNA, 20 nt, Homo sapiens
  source 1..20: mol_type = unassigned RNA
aggtcctatcgtggcccctg

SEQ ID NO: 10296 - RNA, 20 nt, Homo sapiens
  source 1..20: mol_type = unassigned RNA
gagaccctgactctgcagtg

SEQ ID NO: 10297 - RNA, 20 nt, Homo sapiens
  source 1..20: mol_type = unassigned RNA
ctgcagtgtggctctgatgc

SEQ ID NO: 10298 - RNA, 20 nt, Homo sapiens
  source 1..20: mol_type = unassigned RNA
caacagatttgttctgtata

SEQ ID NO: 10299 - RNA, 20 nt, Homo sapiens
  source 1..20: mol_type = unassigned RNA
agatttgttctgtataagga

SEQ ID NO: 10300 - RNA, 20 nt, Homo sapiens
  source 1..20: mol_type = unassigned RNA
gatttgttctgtataaggac

SEQ ID NO: 10301 - RNA, 20 nt, Homo sapiens
  source 1..20: mol_type = unassigned RNA
atttgttctgtataaggacg

SEQ ID NO: 10302 - RNA, 20 nt, Homo sapiens
  source 1..20: mol_type = unassigned RNA
cgtgacttccttcagctcgc

SEQ ID NO: 10303 - RNA, 20 nt, Homo sapiens
  source 1..20: mol_type = unassigned RNA
gctcgctggcgcacagcccc

SEQ ID NO: 10304 - RNA, 20 nt, Homo sapiens
  source 1..20: mol_type = unassigned RNA
gctggcgcacagccccaggc

SEQ ID NO: 10305 - RNA, 20 nt, Homo sapiens
  source 1..20: mol_type = unassigned RNA
ctggcgcacagccccaggct

SEQ ID NO: 10306 - RNA, 20 nt, Homo sapiens
  source 1..20: mol_type = unassigned RNA
gccccaggctgggctctccc

SEQ ID NO: 10307 - RNA, 20 nt, Homo sapiens
  source 1..20: mol_type = unassigned RNA
ctcccaggccaacttcaccc

SEQ ID NO: 10308 - RNA, 20 nt, Homo sapiens
  source 1..20: mol_type = unassigned RNA
tcccaggccaacttcaccct

SEQ ID NO: 10309 - RNA, 20 nt, Homo sapiens
  source 1..20: mol_type = unassigned RNA
ggccctgtgagccgctccta

SEQ ID NO: 10310 - RNA, 20 nt, Homo sapiens
  source 1..20: mol_type = unassigned RNA
gccctgtgagccgctcctac

SEQ ID NO: 10311 - RNA, 20 nt, Homo sapiens
  source 1..20: mol_type = unassigned RNA
ccctgtgagccgctcctacg

SEQ ID NO: 10312 - RNA, 20 nt, Homo sapiens
  source 1..20: mol_type = unassigned RNA
cctgtgagccgctcctacgg

SEQ ID NO: 10313 - RNA, 20 nt, Homo sapiens
  source 1..20: mol_type = unassigned RNA
gggggccagtacagatgcta

SEQ ID NO: 10314 - RNA, 20 nt, Homo sapiens
  source 1..20: mol_type = unassigned RNA
cacacaacctctcctccgag

SEQ ID NO: 10315 - RNA, 20 nt, Homo sapiens
  source 1..20: mol_type = unassigned RNA
caacctctcctccgagtggt

SEQ ID NO: 10316 - RNA, 20 nt, Homo sapiens
  source 1..20: mol_type = unassigned RNA
gtcggcccccagcgaccccc

SEQ ID NO: 10317 - RNA, 20 nt, Homo sapiens
  source 1..20: mol_type = unassigned RNA
cccctggacatcctgatcgc

SEQ ID NO: 10318 - RNA, 20 nt, Homo sapiens
  source 1..20: mol_type = unassigned RNA
ggacatcctgatcgcaggtg

SEQ ID NO: 10319 - RNA, 20 nt, Homo sapiens
  source 1..20: mol_type = unassigned RNA
atcgcaggtgaggagcccag

SEQ ID NO: 10320 - RNA, 20 nt, Homo sapiens
  source 1..20: mol_type = unassigned RNA
tcgcaggtgaggagcccagc

SEQ ID NO: 10321 - RNA, 20 nt, Homo sapiens
  source 1..20: mol_type = unassigned RNA
cacctgggaaaaggtggtca

SEQ ID NO: 10322 - RNA, 20 nt, Homo sapiens
  source 1..20: mol_type = unassigned RNA
tagaaacacctgggaaaagg

SEQ ID NO: 10323 - RNA, 20 nt, Homo sapiens
  source 1..20: mol_type = unassigned RNA
tcttagaaacacctgggaaa

SEQ ID NO: 10324 - RNA, 20 nt, Homo sapiens
  source 1..20: mol_type = unassigned RNA
atggcttcttagaaacacct

SEQ ID NO: 10325 - RNA, 20 nt, Homo sapiens
  source 1..20: mol_type = unassigned RNA
gatggcttcttagaaacacc

SEQ ID NO: 10326 - RNA, 20 nt, Homo sapiens
  source 1..20: mol_type = unassigned RNA
cctggctgcactgagagtga

SEQ ID NO: 10327 - RNA, 20 nt, Homo sapiens
  source 1..20: mol_type = unassigned RNA
tcaggggccacgataggacc

SEQ ID NO: 10328 - RNA, 20 nt, Homo sapiens
  source 1..20: mol_type = unassigned RNA
gtctcctcaggggccacgat

SEQ ID NO: 10329 - RNA, 20 nt, Homo sapiens
  source 1..20: mol_type = unassigned RNA
cagagtcagggtctcctcag

SEQ ID NO: 10330 - RNA, 20 nt, Homo sapiens
  source 1..20: mol_type = unassigned RNA
gcagagtcagggtctcctca

SEQ ID NO: 10331 - RNA, 20 nt, Homo sapiens
  source 1..20: mol_type = unassigned RNA
tgcagagtcagggtctcctc

SEQ ID NO: 10332 - RNA, 20 nt, Homo sapiens
  source 1..20: mol_type = unassigned RNA
agagccacactgcagagtca

SEQ ID NO: 10333 - RNA, 20 nt, Homo sapiens
  source 1..20: mol_type = unassigned RNA
cagagccacactgcagagtc

SEQ ID NO: 10334 - RNA, 20 nt, Homo sapiens
  source 1..20: mol_type = unassigned RNA
gctgtgcgccagcgagctga

SEQ ID NO: 10335 - RNA, 20 nt, Homo sapiens
  source 1..20: mol_type = unassigned RNA
gcctgggagagcccagcctg

SEQ ID NO: 10336 - RNA, 20 nt, Homo sapiens
  source 1..20: mol_type = unassigned RNA
ggcctgggagagcccagcct

SEQ ID NO: 10337 - RNA, 20 nt, Homo sapiens
  source 1..20: mol_type = unassigned RNA
tggcctgggagagcccagcc

SEQ ID NO: 10338 - RNA, 20 nt, Homo sapiens
  source 1..20: mol_type = unassigned RNA
gcccagggtgaagttggcct

SEQ ID NO: 10339 - RNA, 20 nt, Homo sapiens
  source 1..20: mol_type = unassigned RNA
ggcccagggtgaagttggcc

SEQ ID NO: 10340 - RNA, 20 nt, Homo sapiens
  source 1..20: mol_type = unassigned RNA
cacagggcccagggtgaagt

SEQ ID NO: 10341 - RNA, 20 nt, Homo sapiens
  source 1..20: mol_type = unassigned RNA
ggagcggctcacagggccca

SEQ ID NO: 10342 - RNA, 20 nt, Homo sapiens
  source 1..20: mol_type = unassigned RNA
aggagcggctcacagggccc

SEQ ID NO: 10343 - RNA, 20 nt, Homo sapiens
  source 1..20: mol_type = unassigned RNA
ccccgtaggagcggctcaca

SEQ ID NO: 10344 - RNA, 20 nt, Homo sapiens
  source 1..20: mol_type = unassigned RNA
cccccgtaggagcggctcac

SEQ ID NO: 10345 - RNA, 20 nt, Homo sapiens
  source 1..20: mol_type = unassigned RNA
tgtactggcccccgtaggag

SEQ ID NO: 10346 - RNA, 20 nt, Homo sapiens
  source 1..20: mol_type = unassigned RNA
gcatctgtactggcccccgt

SEQ ID NO: 10347 - RNA, 20 nt, Homo sapiens
  source 1..20: mol_type = unassigned RNA
gtgcaccgtagcatctgtac

SEQ ID NO: 10348 - RNA, 20 nt, Homo sapiens
  source 1..20: mol_type = unassigned RNA
gggccgaccactcggaggag

SEQ ID NO: 10349 - RNA, 20 nt, Homo sapiens
  source 1..20: mol_type = unassigned RNA
gctgggggccgaccactcgg

SEQ ID NO: 10350 - RNA, 20 nt, Homo sapiens
  source 1..20: mol_type = unassigned RNA
gtcgctgggggccgaccact

SEQ ID NO: 10351 - RNA, 20 nt, Homo sapiens
  source 1..20: mol_type = unassigned RNA
gatgtccagggggtcgctgg

SEQ ID NO: 10352 - RNA, 20 nt, Homo sapiens
  source 1..20: mol_type = unassigned RNA
ggatgtccagggggtcgctg

SEQ ID NO: 10353 - RNA, 20 nt, Homo sapiens
  source 1..20: mol_type = unassigned RNA
aggatgtccagggggtcgct

SEQ ID NO: 10354 - RNA, 20 nt, Homo sapiens
  source 1..20: mol_type = unassigned RNA
caggatgtccagggggtcgc

SEQ ID NO: 10355 - RNA, 20 nt, Homo sapiens
  source 1..20: mol_type = unassigned RNA
ctgcgatcaggatgtccagg

SEQ ID NO: 10356 - RNA, 20 nt, Homo sapiens
  source 1..20: mol_type = unassigned RNA
cctgcgatcaggatgtccag

SEQ ID NO: 10357 - RNA, 20 nt, Homo sapiens
  source 1..20: mol_type = unassigned RNA
acctgcgatcaggatgtcca

SEQ ID NO: 10358 - RNA, 20 nt, Homo sapiens
  source 1..20: mol_type = unassigned RNA
cacctgcgatcaggatgtcc

SEQ ID NO: 10359 - RNA, 20 nt, Homo sapiens
  source 1..20: mol_type = unassigned RNA
tgggctcctcacctgcgatc

SEQ ID NO: 10360 - RNA, 20 nt, Homo sapiens
  source 1..20: mol_type = unassigned RNA
ctatgacagagtctccctct

SEQ ID NO: 10361 - RNA, 20 nt, Homo sapiens
  source 1..20: mol_type = unassigned RNA
agtctccctctcggtgcagc

SEQ ID NO: 10362 - RNA, 20 nt, Homo sapiens
  source 1..20: mol_type = unassigned RNA
gtctccctctcggtgcagcc

SEQ ID NO: 10363 - RNA, 20 nt, Homo sapiens
  source 1..20: mol_type = unassigned RNA
ctcggtgcagccgggcccca

SEQ ID NO: 10364 - RNA, 20 nt, Homo sapiens
  source 1..20: mol_type = unassigned RNA
ggtgcagccgggccccacgg

SEQ ID NO: 10365 - RNA, 20 nt, Homo sapiens
  source 1..20: mol_type = unassigned RNA
ccgggccccacggtggcctc

SEQ ID NO: 10366 - RNA, 20 nt, Homo sapiens
  source 1..20: mol_type = unassigned RNA
gaccctgctgtgtcagtcac

SEQ ID NO: 10367 - RNA, 20 nt, Homo sapiens
  source 1..20: mol_type = unassigned RNA
accctgctgtgtcagtcaca

SEQ ID NO: 10368 - RNA, 20 nt, Homo sapiens
  source 1..20: mol_type = unassigned RNA
tgctgtgtcagtcacaggga

SEQ ID NO: 10369 - RNA, 20 nt, Homo sapiens
  source 1..20: mol_type = unassigned RNA
gcaaactttccttctgacca

SEQ ID NO: 10370 - RNA, 20 nt, Homo sapiens
  source 1..20: mol_type = unassigned RNA
aactttccttctgaccaagg

SEQ ID NO: 10371 - RNA, 20 nt, Homo sapiens
  source 1..20: mol_type = unassigned RNA
actttccttctgaccaagga

SEQ ID NO: 10372 - RNA, 20 nt, Homo sapiens
  source 1..20: mol_type = unassigned RNA
ctttccttctgaccaaggag

SEQ ID NO: 10373 - RNA, 20 nt, Homo sapiens
  source 1..20: mol_type = unassigned RNA
tttccttctgaccaaggagg

SEQ ID NO: 10374 - RNA, 20 nt, Homo sapiens
  source 1..20: mol_type = unassigned RNA
agggggcagctgatgaccca

SEQ ID NO: 10375 - RNA, 20 nt, Homo sapiens
  source 1..20: mol_type = unassigned RNA
gtaccaatctcaaaaatacc

SEQ ID NO: 10376 - RNA, 20 nt, Homo sapiens
  source 1..20: mol_type = unassigned RNA
ataccaggctgaattcccca

SEQ ID NO: 10377 - RNA, 20 nt, Homo sapiens
  source 1..20: mol_type = unassigned RNA
taccaggctgaattccccat

SEQ ID NO: 10378 - RNA, 20 nt, Homo sapiens
  source 1..20: mol_type = unassigned RNA
tcctgtgacctcagcccatg

SEQ ID NO: 10379 - RNA, 20 nt, Homo sapiens
  source 1..20: mol_type = unassigned RNA
cctgtgacctcagcccatgc

SEQ ID NO: 10380 - RNA, 20 nt, Homo sapiens
  source 1..20: mol_type = unassigned RNA
ctgtgacctcagcccatgcg

SEQ ID NO: 10381 - RNA, 20 nt, Homo sapiens
  source 1..20: mol_type = unassigned RNA
cagcccatgcggggacctac

SEQ ID NO: 10382 - RNA, 20 nt, Homo sapiens
  source 1..20: mol_type = unassigned RNA
gcggggacctacaggtgcta

SEQ ID NO: 10383 - RNA, 20 nt, Homo sapiens
  source 1..20: mol_type = unassigned RNA
gactcaccccagtgaccccc

SEQ ID NO: 10384 - RNA, 20 nt, Homo sapiens
  source 1..20: mol_type = unassigned RNA
cagtgaccccctggagctcg

SEQ ID NO: 10385 - RNA, 20 nt, Homo sapiens
  source 1..20: mol_type = unassigned RNA
cccctggagctcgtggtctc

SEQ ID NO: 10386 - RNA, 20 nt, Homo sapiens
  source 1..20: mol_type = unassigned RNA
ctggagctcgtggtctcagg

SEQ ID NO: 10387 - RNA, 20 nt, Homo sapiens
  source 1..20: mol_type = unassigned RNA
tggagctcgtggtctcaggt

SEQ ID NO: 10388 - RNA, 20 nt, Homo sapiens
  source 1..20: mol_type = unassigned RNA
ggagctcgtggtctcaggtg

SEQ ID NO: 10389 - RNA, 20 nt, Homo sapiens
  source 1..20: mol_type = unassigned RNA
gagctcgtggtctcaggtgg

SEQ ID NO: 10390 - RNA, 20 nt, Homo sapiens
  source 1..20: mol_type = unassigned RNA
gtcctggagagaagaaggat

SEQ ID NO: 10391 - RNA, 20 nt, Homo sapiens
  source 1..20: mol_type = unassigned RNA
tgtcctggagagaagaagga

SEQ ID NO: 10392 - RNA, 20 nt, Homo sapiens
  source 1..20: mol_type = unassigned RNA
gaactgtcctggagagaaga

SEQ ID NO: 10393 - RNA, 20 nt, Homo sapiens
  source 1..20: mol_type = unassigned RNA
actctgtcatagaactgtcc

SEQ ID NO: 10394 - RNA, 20 nt, Homo sapiens
  source 1..20: mol_type = unassigned RNA
ggggcccggctgcaccgaga

SEQ ID NO: 10395 - RNA, 20 nt, Homo sapiens
  source 1..20: mol_type = unassigned RNA
tggggcccggctgcaccgag

SEQ ID NO: 10396 - RNA, 20 nt, Homo sapiens
  source 1..20: mol_type = unassigned RNA
cctgaggccaccgtggggcc

SEQ ID NO: 10397 - RNA, 20 nt, Homo sapiens
  source 1..20: mol_type = unassigned RNA
tctctcctgaggccaccgtg

SEQ ID NO: 10398 - RNA, 20 nt, Homo sapiens
  source 1..20: mol_type = unassigned RNA
ttctctcctgaggccaccgt

SEQ ID NO: 10399 - RNA, 20 nt, Homo sapiens
  source 1..20: mol_type = unassigned RNA
gttctctcctgaggccaccg

SEQ ID NO: 10400 - RNA, 20 nt, Homo sapiens
  source 1..20: mol_type = unassigned RNA
cagggtcacgttctctcctg

SEQ ID NO: 10401 - RNA, 20 nt, Homo sapiens
  source 1..20: mol_type = unassigned RNA
tccctgtgactgacacagca

SEQ ID NO: 10402 - RNA, 20 nt, Homo sapiens
  source 1..20: mol_type = unassigned RNA
atccctgtgactgacacagc

SEQ ID NO: 10403 - RNA, 20 nt, Homo sapiens
  source 1..20: mol_type = unassigned RNA
ctgccccctccttggtcaga

SEQ ID NO: 10404 - RNA, 20 nt, Homo sapiens
  source 1..20: mol_type = unassigned RNA
gtcatcagctgccccctcct

SEQ ID NO: 10405 - RNA, 20 nt, Homo sapiens
  source 1..20: mol_type = unassigned RNA
acgttgatcttagacgccat

SEQ ID NO: 10406 - RNA, 20 nt, Homo sapiens
  source 1..20: mol_type = unassigned RNA
tacgttgatcttagacgcca

SEQ ID NO: 10407 - RNA, 20 nt, Homo sapiens
  source 1..20: mol_type = unassigned RNA
cagcctggtatttttgagat

SEQ ID NO: 10408 - RNA, 20 nt, Homo sapiens
  source 1..20: mol_type = unassigned RNA
gacccatggggaattcagcc

SEQ ID NO: 10409 - RNA, 20 nt, Homo sapiens
  source 1..20: mol_type = unassigned RNA
ctgaggtcacaggacccatg

SEQ ID NO: 10410 - RNA, 20 nt, Homo sapiens
  source 1..20: mol_type = unassigned RNA
gctgaggtcacaggacccat

SEQ ID NO: 10411 - RNA, 20 nt, Homo sapiens
  source 1..20: mol_type = unassigned RNA
ggctgaggtcacaggaccca

SEQ ID NO: 10412 - RNA, 20 nt, Homo sapiens
  source 1..20: mol_type = unassigned RNA
cccgcatgggctgaggtcac

SEQ ID NO: 10413 - RNA, 20 nt, Homo sapiens
  source 1..20: mol_type = unassigned RNA
gtaggtccccgcatgggctg

SEQ ID NO: 10414 - RNA, 20 nt, Homo sapiens
  source 1..20: mol_type = unassigned RNA
gcacctgtaggtccccgcat

SEQ ID NO: 10415 - RNA, 20 nt, Homo sapiens
  source 1..20: mol_type = unassigned RNA
agcacctgtaggtccccgca

SEQ ID NO: 10416 - RNA, 20 nt, Homo sapiens
  source 1..20: mol_type = unassigned RNA
ctgtgagccgtagcacctgt

SEQ ID NO: 10417 - RNA, 20 nt, Homo sapiens
  source 1..20: mol_type = unassigned RNA
gtgagtcagcaggtagggtt

SEQ ID NO: 10418 - RNA, 20 nt, Homo sapiens
  source 1..20: mol_type = unassigned RNA
ctggggtgagtcagcaggta

SEQ ID NO: 10419 - RNA, 20 nt, Homo sapiens
  source 1..20: mol_type = unassigned RNA
actggggtgagtcagcaggt

SEQ ID NO: 10420 - RNA, 20 nt, Homo sapiens
  source 1..20: mol_type = unassigned RNA
ggtcactggggtgagtcagc

SEQ ID NO: 10421 - RNA, 20 nt, Homo sapiens
  source 1..20: mol_type = unassigned RNA
cgagctccagggggtcactg

SEQ ID NO: 10422 - RNA, 20 nt, Homo sapiens
  source 1..20: mol_type = unassigned RNA
acgagctccagggggtcact

SEQ ID NO: 10423 - RNA, 20 nt, Homo sapiens
  source 1..20: mol_type = unassigned RNA
cacgagctccagggggtcac

SEQ ID NO: 10424 - RNA, 20 nt, Homo sapiens
  source 1..20: mol_type = unassigned RNA
ctgagaccacgagctccagg

SEQ ID NO: 10425 - RNA, 20 nt, Homo sapiens
  source 1..20: mol_type = unassigned RNA
cctgagaccacgagctccag

SEQ ID NO: 10426 - RNA, 20 nt, Homo sapiens
  source 1..20: mol_type = unassigned RNA
acctgagaccacgagctcca

SEQ ID NO: 10427 - RNA, 20 nt, Homo sapiens
  source 1..20: mol_type = unassigned RNA
cacctgagaccacgagctcc

SEQ ID NO: 10428 - RNA, 20 nt, Homo sapiens
  source 1..20: mol_type = unassigned RNA
ttcttttacccaggaccgtc

SEQ ID NO: 10429 - RNA, 20 nt, Homo sapiens
  source 1..20: mol_type = unassigned RNA
tcttttacccaggaccgtct

SEQ ID NO: 10430 - RNA, 20 nt, Homo sapiens
  source 1..20: mol_type = unassigned RNA
cttttacccaggaccgtctg

SEQ ID NO: 10431 - RNA, 20 nt, Homo sapiens
  source 1..20: mol_type = unassigned RNA
ttttacccaggaccgtctgg

SEQ ID NO: 10432 - RNA, 20 nt, Homo sapiens
  source 1..20: mol_type = unassigned RNA
ggccccagctccccgacaac

SEQ ID NO: 10433 - RNA, 20 nt, Homo sapiens
  source 1..20: mol_type = unassigned RNA
acaggccccacctccacatc

SEQ ID NO: 10434 - RNA, 20 nt, Homo sapiens
  source 1..20: mol_type = unassigned RNA
ccacatctggtgagtccctg

SEQ ID NO: 10435 - RNA, 20 nt, Homo sapiens
  source 1..20: mol_type = unassigned RNA
gtcctgggtaaaagaatgag

SEQ ID NO: 10436 - RNA, 20 nt, Homo sapiens
  source 1..20: mol_type = unassigned RNA
tggggcccccagacggtcct

SEQ ID NO: 10437 - RNA, 20 nt, Homo sapiens
  source 1..20: mol_type = unassigned RNA
ctggggcccccagacggtcc

SEQ ID NO: 10438 - RNA, 20 nt, Homo sapiens
  source 1..20: mol_type = unassigned RNA
ggggagctggggcccccaga

SEQ ID NO: 10439 - RNA, 20 nt, Homo sapiens
  source 1..20: mol_type = unassigned RNA
ggcctgttgtcggggagctg

SEQ ID NO: 10440 - RNA, 20 nt, Homo sapiens
  source 1..20: mol_type = unassigned RNA
gggcctgttgtcggggagct

SEQ ID NO: 10441 - RNA, 20 nt, Homo sapiens
  source 1..20: mol_type = unassigned RNA
ggggcctgttgtcggggagc

SEQ ID NO: 10442 - RNA, 20 nt, Homo sapiens
  source 1..20: mol_type = unassigned RNA
ggaggtggggcctgttgtcg

SEQ ID NO: 10443 - RNA, 20 nt, Homo sapiens
  source 1..20: mol_type = unassigned RNA
tggaggtggggcctgttgtc

SEQ ID NO: 10444 - RNA, 20 nt, Homo sapiens
  source 1..20: mol_type = unassigned RNA
gtggaggtggggcctgttgt

SEQ ID NO: 10445 - RNA, 20 nt, Homo sapiens
  source 1..20: mol_type = unassigned RNA
actcaccagatgtggaggtg

SEQ ID NO: 10446 - RNA, 20 nt, Homo sapiens
  source 1..20: mol_type = unassigned RNA
gactcaccagatgtggaggt

SEQ ID NO: 10447 - RNA, 20 nt, Homo sapiens
  source 1..20: mol_type = unassigned RNA
ggactcaccagatgtggagg

SEQ ID NO: 10448 - RNA, 20 nt, Homo sapiens
  source 1..20: mol_type = unassigned RNA
cagggactcaccagatgtgg

SEQ ID NO: 10449 - RNA, 20 nt, Homo sapiens
  source 1..20: mol_type = unassigned RNA
cctcagggactcaccagatg

SEQ ID NO: 10450 - RNA, 20 nt, Homo sapiens
  source 1..20: mol_type = unassigned RNA
cctccccgtcctgacccagc

SEQ ID NO: 10451 - RNA, 20 nt, Homo sapiens
  source 1..20: mol_type = unassigned RNA
tcctgacccagcaggccctg

SEQ ID NO: 10452 - RNA, 20 nt, Homo sapiens
  source 1..20: mol_type = unassigned RNA
gaccagcccctcacccccac

SEQ ID NO: 10453 - RNA, 20 nt, Homo sapiens
  source 1..20: mol_type = unassigned RNA
accagcccctcacccccacc

SEQ ID NO: 10454 - RNA, 20 nt, Homo sapiens
  source 1..20: mol_type = unassigned RNA
gcccctcacccccaccgggt

SEQ ID NO: 10455 - RNA, 20 nt, Homo sapiens
  source 1..20: mol_type = unassigned RNA
accgggtcggatccccagag

SEQ ID NO: 10456 - RNA, 20 nt, Homo sapiens
  source 1..20: mol_type = unassigned RNA
atccccagagtggtgagtga

SEQ ID NO: 10457 - RNA, 20 nt, Homo sapiens
  source 1..20: mol_type = unassigned RNA
tccccagagtggtgagtgac

SEQ ID NO: 10458 - RNA, 20 nt, Homo sapiens
  source 1..20: mol_type = unassigned RNA
ggtgagtgacgggctctgag

SEQ ID NO: 10459 - RNA, 20 nt, Homo sapiens
  source 1..20: mol_type = unassigned RNA
gtgagtgacgggctctgagt

SEQ ID NO: 10460 - RNA, 20 nt, Homo sapiens
  source 1..20: mol_type = unassigned RNA
agtgacgggctctgagtggg

SEQ ID NO: 10461 - RNA, 20 nt, Homo sapiens
  source 1..20: mol_type = unassigned RNA
gacgggctctgagtgggagg

SEQ ID NO: 10462 - RNA, 20 nt, Homo sapiens
  source 1..20: mol_type = unassigned RNA
acgggctctgagtgggaggt

SEQ ID NO: 10463 - RNA, 20 nt, Homo sapiens
  source 1..20: mol_type = unassigned RNA
gctctgagtgggaggtgggc

SEQ ID NO: 10464 - RNA, 20 nt, Homo sapiens
  source 1..20: mol_type = unassigned RNA
ctctgagtgggaggtgggca

SEQ ID NO: 10465 - RNA, 20 nt, Homo sapiens
  source 1..20: mol_type = unassigned RNA
cctgctgggtcaggacgggg

SEQ ID NO: 10466 - RNA, 20 nt, Homo sapiens
  source 1..20: mol_type = unassigned RNA
gggcctgctgggtcaggacg

SEQ ID NO: 10467 - RNA, 20 nt, Homo sapiens
  source 1..20: mol_type = unassigned RNA
agggcctgctgggtcaggac

SEQ ID NO: 10468 - RNA, 20 nt, Homo sapiens
  source 1..20: mol_type = unassigned RNA
cagggcctgctgggtcagga

SEQ ID NO: 10469 - RNA, 20 nt, Homo sapiens
  source 1..20: mol_type = unassigned RNA
tcctcagggcctgctgggtc

SEQ ID NO: 10470 - RNA, 20 nt, Homo sapiens
  source 1..20: mol_type = unassigned RNA
gctggtcctcagggcctgct

SEQ ID NO: 10471 - RNA, 20 nt, Homo sapiens
  source 1..20: mol_type = unassigned RNA
ggctggtcctcagggcctgc

SEQ ID NO: 10472 - RNA, 20 nt, Homo sapiens
  source 1..20: mol_type = unassigned RNA
gggtgaggggctggtcctca

SEQ ID NO: 10473 - RNA, 20 nt, Homo sapiens
  source 1..20: mol_type = unassigned RNA
ggggtgaggggctggtcctc

SEQ ID NO: 10474 - RNA, 20 nt, Homo sapiens
  source 1..20: mol_type = unassigned RNA
acccggtgggggtgaggggc

SEQ ID NO: 10475 - RNA, 20 nt, Homo sapiens
  source 1..20: mol_type = unassigned RNA
tccgacccggtgggggtgag

SEQ ID NO: 10476 - RNA, 20 nt, Homo sapiens
  source 1..20: mol_type = unassigned RNA
atccgacccggtgggggtga

SEQ ID NO: 10477 - RNA, 20 nt, Homo sapiens
  source 1..20: mol_type = unassigned RNA
gatccgacccggtgggggtg

SEQ ID NO: 10478 - RNA, 20 nt, Homo sapiens
  source 1..20: mol_type = unassigned RNA
ctggggatccgacccggtgg

SEQ ID NO: 10479 - RNA, 20 nt, Homo sapiens
  source 1..20: mol_type = unassigned RNA
tctggggatccgacccggtg

SEQ ID NO: 10480 - RNA, 20 nt, Homo sapiens
  source 1..20: mol_type = unassigned RNA
ctctggggatccgacccggt

SEQ ID NO: 10481 - RNA, 20 nt, Homo sapiens
  source 1..20: mol_type = unassigned RNA
actctggggatccgacccgg

SEQ ID NO: 10482 - RNA, 20 nt, Homo sapiens
  source 1..20: mol_type = unassigned RNA
accactctggggatccgacc

SEQ ID NO: 10483 - RNA, 20 nt, Homo sapiens
  source 1..20: mol_type = unassigned RNA
gcccgtcactcaccactctg

SEQ ID NO: 10484 - RNA, 20 nt, Homo sapiens
  source 1..20: mol_type = unassigned RNA
agcccgtcactcaccactct

SEQ ID NO: 10485 - RNA, 20 nt, Homo sapiens
  source 1..20: mol_type = unassigned RNA
gagcccgtcactcaccactc

SEQ ID NO: 10486 - RNA, 20 nt, Homo sapiens
  source 1..20: mol_type = unassigned RNA
cttgggtggggacggagggc

SEQ ID NO: 10487 - RNA, 20 nt, Homo sapiens
  source 1..20: mol_type = unassigned RNA
acatcatcgtgctcaaggtc

SEQ ID NO: 10488 - RNA, 20 nt, Homo sapiens
  source 1..20: mol_type = unassigned RNA
catcatcgtgctcaaggtct

SEQ ID NO: 10489 - RNA, 20 nt, Homo sapiens
  source 1..20: mol_type = unassigned RNA
atcgtgctcaaggtctggga

SEQ ID NO: 10490 - RNA, 20 nt, Homo sapiens
  source 1..20: mol_type = unassigned RNA
tcaaggtctgggaaggcacc

SEQ ID NO: 10491 - RNA, 20 nt, Homo sapiens
  source 1..20: mol_type = unassigned RNA
caaggtctgggaaggcacct

SEQ ID NO: 10492 - RNA, 20 nt, Homo sapiens
  source 1..20: mol_type = unassigned RNA
aaggtctgggaaggcacctg

SEQ ID NO: 10493 - RNA, 20 nt, Homo sapiens
  source 1..20: mol_type = unassigned RNA
aggtctgggaaggcacctgg

SEQ ID NO: 10494 - RNA, 20 nt, Homo sapiens
  source 1..20: mol_type = unassigned RNA
aggcacctgggggttgtgat

SEQ ID NO: 10495 - RNA, 20 nt, Homo sapiens
  source 1..20: mol_type = unassigned RNA
gggggttgtgatcggcatct

SEQ ID NO: 10496 - RNA, 20 nt, Homo sapiens
  source 1..20: mol_type = unassigned RNA
ggttgtgatcggcatcttgg

SEQ ID NO: 10497 - RNA, 20 nt, Homo sapiens
  source 1..20: mol_type = unassigned RNA
catcctccgacatcgacgtc

SEQ ID NO: 10498 - RNA, 20 nt, Homo sapiens
  source 1..20: mol_type = unassigned RNA
atcctccgacatcgacgtca

SEQ ID NO: 10499 - RNA, 20 nt, Homo sapiens
  source 1..20: mol_type = unassigned RNA
atcgacgtcagggcaaacac

SEQ ID NO: 10500 - RNA, 20 nt, Homo sapiens
  source 1..20: mol_type = unassigned RNA
acactggacatcgagtgagt

SEQ ID NO: 10501 - RNA, 20 nt, Homo sapiens
  source 1..20: mol_type = unassigned RNA
cactggacatcgagtgagta

SEQ ID NO: 10502 - RNA, 20 nt, Homo sapiens
  source 1..20: mol_type = unassigned RNA
gacatcgagtgagtagggaa

SEQ ID NO: 10503 - RNA, 20 nt, Homo sapiens
  source 1..20: mol_type = unassigned RNA
acatcgagtgagtagggaat

SEQ ID NO: 10504 - RNA, 20 nt, Homo sapiens
  source 1..20: mol_type = unassigned RNA
catcgagtgagtagggaatg

SEQ ID NO: 10505 - RNA, 20 nt, Homo sapiens
  source 1..20: mol_type = unassigned RNA
atcgagtgagtagggaatgg

SEQ ID NO: 10506 - RNA, 20 nt, Homo sapiens
  source 1..20: mol_type = unassigned RNA
tcgagtgagtagggaatggg

SEQ ID NO: 10507 - RNA, 20 nt, Homo sapiens
  source 1..20: mol_type = unassigned RNA
agatgccgatcacaaccccc

SEQ ID NO: 10508 - RNA, 20 nt, Homo sapiens
  source 1..20: mol_type = unassigned RNA
ctcctcctccagtaggatga

SEQ ID NO: 10509 - RNA, 20 nt, Homo sapiens
  source 1..20: mol_type = unassigned RNA
cctcctcctcctcctccagt

SEQ ID NO: 10510 - RNA, 20 nt, Homo sapiens
  source 1..20: mol_type = unassigned RNA
tcttcccccagcccagagaa

SEQ ID NO: 10511 - RNA, 20 nt, Homo sapiens
  source 1..20: mol_type = unassigned RNA
gctgatttccaacatcctgc

SEQ ID NO: 10512 - RNA, 20 nt, Homo sapiens
  source 1..20: mol_type = unassigned RNA
ctgatttccaacatcctgca

SEQ ID NO: 10513 - RNA, 20 nt, Homo sapiens
  source 1..20: mol_type = unassigned RNA
tgatttccaacatcctgcag

SEQ ID NO: 10514 - RNA, 20 nt, Homo sapiens
  source 1..20: mol_type = unassigned RNA
ccaacatcctgcaggggctg

SEQ ID NO: 10515 - RNA, 20 nt, Homo sapiens
  source 1..20: mol_type = unassigned RNA
caacatcctgcaggggctgt

SEQ ID NO: 10516 - RNA, 20 nt, Homo sapiens
  source 1..20: mol_type = unassigned RNA
aacatcctgcaggggctgtg

SEQ ID NO: 10517 - RNA, 20 nt, Homo sapiens
  source 1..20: mol_type = unassigned RNA
gggccagagcccacagacag

SEQ ID NO: 10518 - RNA, 20 nt, Homo sapiens
  source 1..20: mol_type = unassigned RNA
ccacagacagaggcctgcag

SEQ ID NO: 10519 - RNA, 20 nt, Homo sapiens
  source 1..20: mol_type = unassigned RNA
cagacagaggcctgcagtgg

SEQ ID NO: 10520 - RNA, 20 nt, Homo sapiens
  source 1..20: mol_type = unassigned RNA
ttctctgggctgggggaaga

SEQ ID NO: 10521 - RNA, 20 nt, Homo sapiens
  source 1..20: mol_type = unassigned RNA
tcagcctttctctgggctgg

SEQ ID NO: 10522 - RNA, 20 nt, Homo sapiens
  source 1..20: mol_type = unassigned RNA
atcagcctttctctgggctg

SEQ ID NO: 10523 - RNA, 20 nt, Homo sapiens
  source 1..20: mol_type = unassigned RNA
aatcagcctttctctgggct

SEQ ID NO: 10524 - RNA, 20 nt, Homo sapiens
  source 1..20: mol_type = unassigned RNA
aaatcagcctttctctgggc

SEQ ID NO: 10525 - RNA, 20 nt, Homo sapiens
  source 1..20: mol_type = unassigned RNA
ttggaaatcagcctttctct

SEQ ID NO: 10526 - RNA, 20 nt, Homo sapiens
  source 1..20: mol_type = unassigned RNA
gttggaaatcagcctttctc

SEQ ID NO: 10527 - RNA, 20 nt, Homo sapiens
  source 1..20: mol_type = unassigned RNA
ccacagcccctgcaggatgt

SEQ ID NO: 10528 - RNA, 20 nt, Homo sapiens
  source 1..20: mol_type = unassigned RNA
tctggccccacagcccctgc

SEQ ID NO: 10529 - RNA, 20 nt, Homo sapiens
  source 1..20: mol_type = unassigned RNA
aggcctctgtctgtgggctc

SEQ ID NO: 10530 - RNA, 20 nt, Homo sapiens
  source 1..20: mol_type = unassigned RNA
cactgcaggcctctgtctgt

SEQ ID NO: 10531 - RNA, 20 nt, Homo sapiens
  source 1..20: mol_type = unassigned RNA
ccactgcaggcctctgtctg

SEQ ID NO: 10532 - RNA, 20 nt, Homo sapiens
  source 1..20: mol_type = unassigned RNA
ggcagaattacctccactgc

SEQ ID NO: 10533 - RNA, 20 nt, Homo sapiens
  source 1..20: mol_type = unassigned RNA
cagcccagctgccgatgccc

SEQ ID NO: 10534 - RNA, 20 nt, Homo sapiens
  source 1..20: mol_type = unassigned RNA
agaaaacctctgtgagtgag

SEQ ID NO: 10535 - RNA, 20 nt, Homo sapiens
  source 1..20: mol_type = unassigned RNA
cctctgtgagtgagaggaag

SEQ ID NO: 10536 - RNA, 20 nt, Homo sapiens
  source 1..20: mol_type = unassigned RNA
gctggacctgggggaagaat

SEQ ID NO: 10537 - RNA, 20 nt, Homo sapiens
  source 1..20: mol_type = unassigned RNA
ggctggacctgggggaagaa

SEQ ID NO: 10538 - RNA, 20 nt, Homo sapiens
  source 1..20: mol_type = unassigned RNA
ggcagctgggctggacctgg

SEQ ID NO: 10539 - RNA, 20 nt, Homo sapiens
  source 1..20: mol_type = unassigned RNA
cggcagctgggctggacctg

SEQ ID NO: 10540 - RNA, 20 nt, Homo sapiens
  source 1..20: mol_type = unassigned RNA
tcggcagctgggctggacct

SEQ ID NO: 10541 - RNA, 20 nt, Homo sapiens
  source 1..20: mol_type = unassigned RNA
atcggcagctgggctggacc

SEQ ID NO: 10542 - RNA, 20 nt, Homo sapiens
  source 1..20: mol_type = unassigned RNA
ctgggcatcggcagctgggc

SEQ ID NO: 10543 - RNA, 20 nt, Homo sapiens
  source 1..20: mol_type = unassigned RNA
cttcctgggcatcggcagct

SEQ ID NO: 10544 - RNA, 20 nt, Homo sapiens
  source 1..20: mol_type = unassigned RNA
tcttcctgggcatcggcagc

SEQ ID NO: 10545 - RNA, 20 nt, Homo sapiens
  source 1..20: mol_type = unassigned RNA
gaggttttcttcctgggcat

SEQ ID NO: 10546 - RNA, 20 nt, Homo sapiens
  source 1..20: mol_type = unassigned RNA
ctcacagaggttttcttcct

SEQ ID NO: 10547 - RNA, 20 nt, Homo sapiens
  source 1..20: mol_type = unassigned RNA
actcacagaggttttcttcc

SEQ ID NO: 10548 - RNA, 20 nt, Homo sapiens
  source 1..20: mol_type = unassigned RNA
cctcttcctctcactcacag

SEQ ID NO: 10549 - RNA, 20 nt, Homo sapiens
  source 1..20: mol_type = unassigned RNA
cgtgaagcacacacagcctg

SEQ ID NO: 10550 - RNA, 20 nt, Homo sapiens
  source 1..20: mol_type = unassigned RNA
aagcacacacagcctgagga

SEQ ID NO: 10551 - RNA, 20 nt, Homo sapiens
  source 1..20: mol_type = unassigned RNA
agcacacacagcctgaggat

SEQ ID NO: 10552 - RNA, 20 nt, Homo sapiens
  source 1..20: mol_type = unassigned RNA
gcacacacagcctgaggatg

SEQ ID NO: 10553 - RNA, 20 nt, Homo sapiens
  source 1..20: mol_type = unassigned RNA
cacacagcctgaggatgggg

SEQ ID NO: 10554 - RNA, 20 nt, Homo sapiens
  source 1..20: mol_type = unassigned RNA
gcctgaggatggggtggaga

SEQ ID NO: 10555 - RNA, 20 nt, Homo sapiens
  source 1..20: mol_type = unassigned RNA
atggggtggagatggacact

SEQ ID NO: 10556 - RNA, 20 nt, Homo sapiens
  source 1..20: mol_type = unassigned RNA
tggggtggagatggacactc

SEQ ID NO: 10557 - RNA, 20 nt, Homo sapiens
  source 1..20: mol_type = unassigned RNA
catctgctggggcagagcaa

SEQ ID NO: 10558 - RNA, 20 nt, Homo sapiens
  source 1..20: mol_type = unassigned RNA
gcatctgctggggcagagca

SEQ ID NO: 10559 - RNA, 20 nt, Homo sapiens
  source 1..20: mol_type = unassigned RNA
cttcacggcagcatctgctg

SEQ ID NO: 10560 - RNA, 20 nt, Homo sapiens
  source 1..20: mol_type = unassigned RNA
gcttcacggcagcatctgct

SEQ ID NO: 10561 - RNA, 20 nt, Homo sapiens
  source 1..20: mol_type = unassigned RNA
tgcttcacggcagcatctgc

SEQ ID NO: 10562 - RNA, 20 nt, Homo sapiens
  source 1..20: mol_type = unassigned RNA
ctcaggctgtgtgtgcttca

SEQ ID NO: 10563 - RNA, 20 nt, Homo sapiens
  source 1..20: mol_type = unassigned RNA
tccatctccaccccatcctc

SEQ ID NO: 10564 - RNA, 20 nt, Homo sapiens
  source 1..20: mol_type = unassigned RNA
cccacacgatgaagaccccc

SEQ ID NO: 10565 - RNA, 20 nt, Homo sapiens
  source 1..20: mol_type = unassigned RNA
ccaggcagtgacgtatgccg

SEQ ID NO: 10566 - RNA, 20 nt, Homo sapiens
  source 1..20: mol_type = unassigned RNA
aggtgaaacactccagacct

SEQ ID NO: 10567 - RNA, 20 nt, Homo sapiens
  source 1..20: mol_type = unassigned RNA
ctccagacctaggagagaaa

SEQ ID NO: 10568 - RNA, 20 nt, Homo sapiens
  source 1..20: mol_type = unassigned RNA
tctcctccttccccactgtc

SEQ ID NO: 10569 - RNA, 20 nt, Homo sapiens
  source 1..20: mol_type = unassigned RNA
ctcctccttccccactgtct

SEQ ID NO: 10570 - RNA, 20 nt, Homo sapiens
  source 1..20: mol_type = unassigned RNA
tcctccttccccactgtctg

SEQ ID NO: 10571 - RNA, 20 nt, Homo sapiens
  source 1..20: mol_type = unassigned RNA
cccactgtctggggaattcc

SEQ ID NO: 10572 - RNA, 20 nt, Homo sapiens
  source 1..20: mol_type = unassigned RNA
tggggaattcctggacacaa

SEQ ID NO: 10573 - RNA, 20 nt, Homo sapiens
  source 1..20: mol_type = unassigned RNA
cctggacacaaaggacagac

SEQ ID NO: 10574 - RNA, 20 nt, Homo sapiens
  source 1..20: mol_type = unassigned RNA
ggacacaaaggacagacagg

SEQ ID NO: 10575 - RNA, 20 nt, Homo sapiens
  source 1..20: mol_type = unassigned RNA
aaaggacagacaggcggaag

SEQ ID NO: 10576 - RNA, 20 nt, Homo sapiens
  source 1..20: mol_type = unassigned RNA
acagacaggcggaagaggac

SEQ ID NO: 10577 - RNA, 20 nt, Homo sapiens
  source 1..20: mol_type = unassigned RNA
ggcggaagaggacaggcaga

SEQ ID NO: 10578 - RNA, 20 nt, Homo sapiens
  source 1..20: mol_type = unassigned RNA
ggacaggcagatggacactg

SEQ ID NO: 10579 - RNA, 20 nt, Homo sapiens
  source 1..20: mol_type = unassigned RNA
ctgctggagagagacagtgg

SEQ ID NO: 10580 - RNA, 20 nt, Homo sapiens
  source 1..20: mol_type = unassigned RNA
gctctgctggagagagacag

SEQ ID NO: 10581 - RNA, 20 nt, Homo sapiens
  source 1..20: mol_type = unassigned RNA
cttcatcgtgtgggctctgc

SEQ ID NO: 10582 - RNA, 20 nt, Homo sapiens
  source 1..20: mol_type = unassigned RNA
cctgggggtcttcatcgtgt

SEQ ID NO: 10583 - RNA, 20 nt, Homo sapiens
  source 1..20: mol_type = unassigned RNA
gcctgggggtcttcatcgtg

SEQ ID NO: 10584 - RNA, 20 nt, Homo sapiens
  source 1..20: mol_type = unassigned RNA
cggcatacgtcactgcctgg

SEQ ID NO: 10585 - RNA, 20 nt, Homo sapiens
  source 1..20: mol_type = unassigned RNA
tcggcatacgtcactgcctg

SEQ ID NO: 10586 - RNA, 20 nt, Homo sapiens
  source 1..20: mol_type = unassigned RNA
ctcggcatacgtcactgcct

SEQ ID NO: 10587 - RNA, 20 nt, Homo sapiens
  source 1..20: mol_type = unassigned RNA
cctcggcatacgtcactgcc

SEQ ID NO: 10588 - RNA, 20 nt, Homo sapiens
  source 1..20: mol_type = unassigned RNA
aggtctggagtgtttcacct

SEQ ID NO: 10589 - RNA, 20 nt, Homo sapiens
  source 1..20: mol_type = unassigned RNA
ggccatttctctcctaggtc

SEQ ID NO: 10590 - RNA, 20 nt, Homo sapiens
  source 1..20: mol_type = unassigned RNA
ggagaggccatttctctcct

SEQ ID NO: 10591 - RNA, 20 nt, Homo sapiens
  source 1..20: mol_type = unassigned RNA
agacagtggggaaggaggag

SEQ ID NO: 10592 - RNA, 20 nt, Homo sapiens
  source 1..20: mol_type = unassigned RNA
tccccagacagtggggaagg

SEQ ID NO: 10593 - RNA, 20 nt, Homo sapiens
  source 1..20: mol_type = unassigned RNA
aattccccagacagtgggga

SEQ ID NO: 10594 - RNA, 20 nt, Homo sapiens
  source 1..20: mol_type = unassigned RNA
caggaattccccagacagtg

SEQ ID NO: 10595 - RNA, 20 nt, Homo sapiens
  source 1..20: mol_type = unassigned RNA
ccaggaattccccagacagt

SEQ ID NO: 10596 - RNA, 20 nt, Homo sapiens
  source 1..20: mol_type = unassigned RNA
tccaggaattccccagacag

SEQ ID NO: 10597 - RNA, 20 nt, Homo sapiens
  source 1..20: mol_type = unassigned RNA
cctgtctgtcctttgtgtcc

SEQ ID NO: 10598 - RNA, 20 nt, Homo sapiens
  source 1..20: mol_type = unassigned RNA
tgctgcatctgaagcccccc

SEQ ID NO: 10599 - RNA, 20 nt, Homo sapiens
  source 1..20: mol_type = unassigned RNA
tgcacagcttgaccctcaga

SEQ ID NO: 10600 - RNA, 20 nt, Homo sapiens
  source 1..20: mol_type = unassigned RNA
gcacagcttgaccctcagac

SEQ ID NO: 10601 - RNA, 20 nt, Homo sapiens
  source 1..20: mol_type = unassigned RNA
cagcttgaccctcagacggg

SEQ ID NO: 10602 - RNA, 20 nt, Homo sapiens
  source 1..20: mol_type = unassigned RNA
aactgagcctcctccatccc

SEQ ID NO: 10603 - RNA, 20 nt, Homo sapiens
  source 1..20: mol_type = unassigned RNA
gagcctcctccatcccagga

SEQ ID NO: 10604 - RNA, 20 nt, Homo sapiens
  source 1..20: mol_type = unassigned RNA
agcctcctccatcccaggaa

SEQ ID NO: 10605 - RNA, 20 nt, Homo sapiens
  source 1..20: mol_type = unassigned RNA
gcccagcatctacgccactc

SEQ ID NO: 10606 - RNA, 20 nt, Homo sapiens
  source 1..20: mol_type = unassigned RNA
ctctggccatccactagccc

SEQ ID NO: 10607 - RNA, 20 nt, Homo sapiens
  source 1..20: mol_type = unassigned RNA
tctggccatccactagccca

SEQ ID NO: 10608 - RNA, 20 nt, Homo sapiens
  source 1..20: mol_type = unassigned RNA
ctggccatccactagcccag

SEQ ID NO: 10609 - RNA, 20 nt, Homo sapiens
  source 1..20: mol_type = unassigned RNA
tggccatccactagcccagg

SEQ ID NO: 10610 - RNA, 20 nt, Homo sapiens
  source 1..20: mol_type = unassigned RNA
ggccatccactagcccaggg

SEQ ID NO: 10611 - RNA, 20 nt, Homo sapiens
  source 1..20: mol_type = unassigned RNA
gccatccactagcccagggg

SEQ ID NO: 10612 - RNA, 20 nt, Homo sapiens
  source 1..20: mol_type = unassigned RNA
gacgcagaccccacactcca

SEQ ID NO: 10613 - RNA, 20 nt, Homo sapiens
  source 1..20: mol_type = unassigned RNA
accccacactccatggagtc

SEQ ID NO: 10614 - RNA, 20 nt, Homo sapiens
  source 1..20: mol_type = unassigned RNA
tccatggagtctggaatgca

SEQ ID NO: 10615 - RNA, 20 nt, Homo sapiens
  source 1..20: mol_type = unassigned RNA
ccatggagtctggaatgcat

SEQ ID NO: 10616 - RNA, 20 nt, Homo sapiens
  source 1..20: mol_type = unassigned RNA
catgggagctgcccccccag

SEQ ID NO: 10617 - RNA, 20 nt, Homo sapiens
  source 1..20: mol_type = unassigned RNA
gcccccccagtggacaccat

SEQ ID NO: 10618 - RNA, 20 nt, Homo sapiens
  source 1..20: mol_type = unassigned RNA
ccattggaccccacccagcc

SEQ ID NO: 10619 - RNA, 20 nt, Homo sapiens
  source 1..20: mol_type = unassigned RNA
acccagcctggatctacccc

SEQ ID NO: 10620 - RNA, 20 nt, Homo sapiens
  source 1..20: mol_type = unassigned RNA
ggatctaccccaggagactc

SEQ ID NO: 10621 - RNA, 20 nt, Homo sapiens
  source 1..20: mol_type = unassigned RNA
gatctaccccaggagactct

SEQ ID NO: 10622 - RNA, 20 nt, Homo sapiens
  source 1..20: mol_type = unassigned RNA
aggagactctgggaactttt

SEQ ID NO: 10623 - RNA, 20 nt, Homo sapiens
  source 1..20: mol_type = unassigned RNA
ggagactctgggaactttta

SEQ ID NO: 10624 - RNA, 20 nt, Homo sapiens
  source 1..20: mol_type = unassigned RNA
gagactctgggaacttttag

SEQ ID NO: 10625 - RNA, 20 nt, Homo sapiens
  source 1..20: mol_type = unassigned RNA
gatgcagcagcctgcagcgg

SEQ ID NO: 10626 - RNA, 20 nt, Homo sapiens
  source 1..20: mol_type = unassigned RNA
agatgcagcagcctgcagcg

SEQ ID NO: 10627 - RNA, 20 nt, Homo sapiens
  source 1..20: mol_type = unassigned RNA
cagatgcagcagcctgcagc

SEQ ID NO: 10628 - RNA, 20 nt, Homo sapiens
  source 1..20: mol_type = unassigned RNA
tcagatgcagcagcctgcag

SEQ ID NO: 10629 - RNA, 20 nt, Homo sapiens
  source 1..20: mol_type = unassigned RNA
ggcgtaggtcacatcctggg

SEQ ID NO: 10630 - RNA, 20 nt, Homo sapiens
  source 1..20: mol_type = unassigned RNA
gggcgtaggtcacatcctgg

SEQ ID NO: 10631 - RNA, 20 nt, Homo sapiens
  source 1..20: mol_type = unassigned RNA
tgggcgtaggtcacatcctg

SEQ ID NO: 10632 - RNA, 20 nt, Homo sapiens
  source 1..20: mol_type = unassigned RNA
ctgggcgtaggtcacatcct

SEQ ID NO: 10633 - RNA, 20 nt, Homo sapiens
  source 1..20: mol_type = unassigned RNA
gctgggcgtaggtcacatcc

SEQ ID NO: 10634 - RNA, 20 nt, Homo sapiens
  source 1..20: mol_type = unassigned RNA
caagctgtgcagctgggcgt

SEQ ID NO: 10635 - RNA, 20 nt, Homo sapiens
  source 1..20: mol_type = unassigned RNA
gagggtcaagctgtgcagct

SEQ ID NO: 10636 - RNA, 20 nt, Homo sapiens
  source 1..20: mol_type = unassigned RNA
tgagggtcaagctgtgcagc

SEQ ID NO: 10637 - RNA, 20 nt, Homo sapiens
  source 1..20: mol_type = unassigned RNA
ctcagttgcctcccgtctga

SEQ ID NO: 10638 - RNA, 20 nt, Homo sapiens
  source 1..20: mol_type = unassigned RNA
gctcagttgcctcccgtctg

SEQ ID NO: 10639 - RNA, 20 nt, Homo sapiens
  source 1..20: mol_type = unassigned RNA
ggcccttcctgggatggagg

SEQ ID NO: 10640 - RNA, 20 nt, Homo sapiens
  source 1..20: mol_type = unassigned RNA
gagggcccttcctgggatgg

SEQ ID NO: 10641 - RNA, 20 nt, Homo sapiens
  source 1..20: mol_type = unassigned RNA
ggagagggcccttcctggga

SEQ ID NO: 10642 - RNA, 20 nt, Homo sapiens
  source 1..20: mol_type = unassigned RNA
agctggagagggcccttcct

SEQ ID NO: 10643 - RNA, 20 nt, Homo sapiens
  source 1..20: mol_type = unassigned RNA
cagctggagagggcccttcc

SEQ ID NO: 10644 - RNA, 20 nt, Homo sapiens
  source 1..20: mol_type = unassigned RNA
atgctgggcacagctggaga

SEQ ID NO: 10645 - RNA, 20 nt, Homo sapiens
  source 1..20: mol_type = unassigned RNA
gatgctgggcacagctggag

SEQ ID NO: 10646 - RNA, 20 nt, Homo sapiens
  source 1..20: mol_type = unassigned RNA
gcgtagatgctgggcacagc

SEQ ID NO: 10647 - RNA, 20 nt, Homo sapiens
  source 1..20: mol_type = unassigned RNA
gccagagtggcgtagatgct

SEQ ID NO: 10648 - RNA, 20 nt, Homo sapiens
  source 1..20: mol_type = unassigned RNA
ggccagagtggcgtagatgc

SEQ ID NO: 10649 - RNA, 20 nt, Homo sapiens
  source 1..20: mol_type = unassigned RNA
gggctagtggatggccagag

SEQ ID NO: 10650 - RNA, 20 nt, Homo sapiens
  source 1..20: mol_type = unassigned RNA
tccccccctgggctagtgga

SEQ ID NO: 10651 - RNA, 20 nt, Homo sapiens
  source 1..20: mol_type = unassigned RNA
tgcgtccccccctgggctag

SEQ ID NO: 10652 - RNA, 20 nt, Homo sapiens
  source 1..20: mol_type = unassigned RNA
tggggtctgcgtccccccct

SEQ ID NO: 10653 - RNA, 20 nt, Homo sapiens
  source 1..20: mol_type = unassigned RNA
gtggggtctgcgtccccccc

SEQ ID NO: 10654 - RNA, 20 nt, Homo sapiens
  source 1..20: mol_type = unassigned RNA
tccagactccatggagtgtg

SEQ ID NO: 10655 - RNA, 20 nt, Homo sapiens
  source 1..20: mol_type = unassigned RNA
ttccagactccatggagtgt

SEQ ID NO: 10656 - RNA, 20 nt, Homo sapiens
  source 1..20: mol_type = unassigned RNA
attccagactccatggagtg

SEQ ID NO: 10657 - RNA, 20 nt, Homo sapiens
  source 1..20: mol_type = unassigned RNA
cccatgcattccagactcca

SEQ ID NO: 10658 - RNA, 20 nt, Homo sapiens
  source 1..20: mol_type = unassigned RNA
tccaatggtgtccactgggg

SEQ ID NO: 10659 - RNA, 20 nt, Homo sapiens
  source 1..20: mol_type = unassigned RNA
gtccaatggtgtccactggg

SEQ ID NO: 10660 - RNA, 20 nt, Homo sapiens
  source 1..20: mol_type = unassigned RNA
ggtccaatggtgtccactgg

SEQ ID NO: 10661 - RNA, 20 nt, Homo sapiens
  source 1..20: mol_type = unassigned RNA
gggtccaatggtgtccactg

SEQ ID NO: 10662 - RNA, 20 nt, Homo sapiens
  source 1..20: mol_type = unassigned RNA
ggggtccaatggtgtccact

SEQ ID NO: 10663 - RNA, 20 nt, Homo sapiens
  source 1..20: mol_type = unassigned RNA
tggggtccaatggtgtccac

SEQ ID NO: 10664 - RNA, 20 nt, Homo sapiens
  source 1..20: mol_type = unassigned RNA
ccaggctgggtggggtccaa

SEQ ID NO: 10665 - RNA, 20 nt, Homo sapiens
  source 1..20: mol_type = unassigned RNA
gggtagatccaggctgggtg

SEQ ID NO: 10666 - RNA, 20 nt, Homo sapiens
  source 1..20: mol_type = unassigned RNA
ggggtagatccaggctgggt

SEQ ID NO: 10667 - RNA, 20 nt, Homo sapiens
  source 1..20: mol_type = unassigned RNA
tggggtagatccaggctggg

SEQ ID NO: 10668 - RNA, 20 nt, Homo sapiens
  source 1..20: mol_type = unassigned RNA
tcctggggtagatccaggct

SEQ ID NO: 10669 - RNA, 20 nt, Homo sapiens
  source 1..20: mol_type = unassigned RNA
ctcctggggtagatccaggc

SEQ ID NO: 10670 - RNA, 20 nt, Homo sapiens
  source 1..20: mol_type = unassigned RNA
gagtctcctggggtagatcc

SEQ ID NO: 10671 - RNA, 20 nt, Homo sapiens
  source 1..20: mol_type = unassigned RNA
aaagttcccagagtctcctg

SEQ ID NO: 10672 - RNA, 20 nt, Homo sapiens
  source 1..20: mol_type = unassigned RNA
aaaagttcccagagtctcct

SEQ ID NO: 10673 - RNA, 20 nt, Homo sapiens
  source 1..20: mol_type = unassigned RNA
taaaagttcccagagtctcc

SEQ ID NO: 10674 - protein, 448 aa, synthetic construct
  REGION 1..448: note = Description of Artificial Sequence: Synthetic polypeptide
MSRSVALAVLALLSLSGLEAIQRTPKIQVYSRHPAENGKSNFLNCYVSGFHPSDIEVDLLKNGERIEKVEHSDLSFSKDWSFYLLYYTEFTPTEKDEYACRVNHVTLSQPKIVKWDRDMGGGGSGGGGSGGGGSGSHSMRYFSAAVSRPGRGEPRFIAMGYVDDTQFVRFDSDSACPRMEPRAPWVEQEGPEYWEEETRNTKAHAQTDRMNLQTLRGYYNQSEASSHTLQWMIGCDLGSDGRLLRGYEQYAYDGKDYLALNEDLRSWTAADTAAQISKRKCEAANVAEQRRAYLEGTCVEWLHRYLENGKEMLQRADPPKTHVTHHPVFDYEATLRCWALGFYPAEIILTWQRDGEDQTQDVELVETRPAGDGTFQKWAAVVVPSGEEQRYTCHVQHEGLPEPLMLRWKQSSLPTIPIMGIVAGLVVLAAVVTGAAVAAVLWRKKSSD

SEQ ID NO: 10675 - DNA, 1353 bp, synthetic construct
  misc_feature 1..1353: note = Description of Artificial Sequence: Synthetic polynucleotide
  source 1..1353: mol_type = other DNA
gccaccatgagcagatctgtggccctggctgtgctggccctgctgtctctgtctggcctggaagccatccagcggacccccaagatccaggtgtacagcagacaccccgccgaaaacggcaagagcaacttcctgaactgctacgtgtccggcttccaccccagcgacatcgaggtggacctgctgaagaacggcgagcggatcgaaaaggtggaacatagcgacctgagcttcagcaaggactggtccttctacctgctgtactacaccgagttcacccccaccgaaaaggacgagtacgcctgcagagtgaaccacgtgaccctgagccagcccaagatcgtgaagtgggaccgggatatgggcggaggcggatccggcggcggaggatcaggggggggagggtccggatcccacagcatgcggtacttctctgccgccgtgtccagacctggaagaggcgagccccggtttatcgccatgggctacgtggacgacacccagttcgtcagattcgacagcgacagcgcctgcccccggatggaacctagagcaccttgggtggaacaggaaggccccgagtactgggaggaagagacacggaacaccaaggcccacgcccagaccgacagaatgaacctgcagaccctgcggggctactacaaccagagcgaggccagcagccacaccctgcagtggatgatcggctgcgatctgggcagcgacggcagactgctgagaggttacgaacagtacgcctacgacggcaaggactacctggccctgaacgaggacctgcggtcttggacagccgccgatacagccgcccagatcagcaagagaaagtgcgaggccgccaacgtggccgagcagagaagggcttacctggaaggcacctgtgtggaatggctgcatagatacctggaaaacggcaaagagatgctgcagcgggccgacccccctaagacacacgtgacacaccaccccgtgttcgactacgaggccaccctgagatgttgggccctgggcttctatcctgccgagatcatcctgacctggcagagggatggcgaggaccagacccaggacgtggaactggtggaaaccagacctgccggcgacggcaccttccagaaatgggctgctgtggtggtgcccagcggcgaagaacagagatacacctgtcacgtgcagcacgagggcctgcccgaacccctgatgctgagatggaagcagagcagcctgcccaccatccccatcatgggaatcgtggccggactggtggtgctggccgctgtcgtgacaggcgctgcagtggccgccgtgctgtggcggaagaagtccagcgactaa

SEQ ID NO: 10676 - protein, 338 aa, synthetic construct [sequence omitted]

SEQ ID NO: 10677 - RNA, 20 nt, Homo sapiens
  source 1..20: mol_type = unassigned RNA
aggcctctctacttcctgtg

SEQ ID NO: 10678 - RNA, 20 nt, Homo sapiens
  source 1..20: mol_type = unassigned RNA
ggcctctctacttcctgtgt

SEQ ID NO: 10679 - RNA, 20 nt, Homo sapiens
  source 1..20: mol_type = unassigned RNA
gcctctctacttcctgtgtg

SEQ ID NO: 10680 - RNA, 20 nt, Homo sapiens
  source 1..20: mol_type = unassigned RNA
gactctgacaatacctggag

SEQ ID NO: 10681 - RNA, 20 nt, Homo sapiens
  source 1..20: mol_type = unassigned RNA
ggactctgacaatacctgga

SEQ ID NO: 10682 - RNA, 20 nt, Homo sapiens
  source 1..20: mol_type = unassigned RNA
aagaggactctgacaatacc

SEQ ID NO: 10683 - RNA, 20 nt, Homo sapiens
  source 1..20: mol_type = unassigned RNA
ttcctagaaggccaaacaag

SEQ ID NO: 10684 - RNA, 20 nt, Homo sapiens
  source 1..20: mol_type = unassigned RNA
ggtcccacagccttcctaga

SEQ ID NO: 10685 - RNA, 20 nt, Homo sapiens
  source 1..20: mol_type = unassigned RNA
tggactggttgaagaaagct

SEQ ID NO: 10686 - RNA, 20 nt, Homo sapiens
  source 1..20: mol_type = unassigned RNA
gcagaggcctccacctggac

SEQ ID NO: 10687 - RNA, 20 nt, Homo sapiens
  source 1..20: mol_type = unassigned RNA
cttggaaacgttcaaggcag

SEQ ID NO: 10688 - RNA, 20 nt, Homo sapiens
  source 1..20: mol_type = unassigned RNA
acctcacttggaaacgttca

SEQ ID NO: 10689 - RNA, 20 nt, Homo sapiens
  source 1..20: mol_type = unassigned RNA
cctgcgggttttacctcact

SEQ ID NO: 10690 - RNA, 20 nt, Homo sapiens
  source 1..20: mol_type = unassigned RNA
agagaggcctctgggcctgc

SEQ ID NO: 10691 - RNA, 20 nt, Homo sapiens
  source 1..20: mol_type = unassigned RNA
caggaagtagagaggcctct

SEQ ID NO: 10692 - RNA, 20 nt, Homo sapiens
  source 1..20: mol_type = unassigned RNA
accccacacaggaagtagag

SEQ ID NO: 10693 - RNA, 20 nt, Homo sapiens
  source 1..20: mol_type = unassigned RNA
agggtttctgaaccccacac

SEQ ID NO: 10694 - RNA, 20 nt, Homo sapiens
  source 1..20: mol_type = unassigned RNA
cctgaggctgggaggggagg

SEQ ID NO: 10695 - RNA, 20 nt, Homo sapiens
  source 1..20: mol_type = unassigned RNA
tgaagcaggcacctgaggct

SEQ ID NO: 10696 - RNA, 20 nt, Homo sapiens
  source 1..20: mol_type = unassigned RNA
ctgaagcaggcacctgaggc

SEQ ID NO: 10697 - RNA, 20 nt, Homo sapiens
  source 1..20: mol_type = unassigned RNA
ttttctgaagcaggcacctg

SEQ ID NO: 10698 - RNA, 20 nt, Homo sapiens
  source 1..20: mol_type = unassigned RNA
tccagaagtagtaagtctgc

SEQ ID NO: 10699 - RNA, 20 nt, Homo sapiens
  source 1..20: mol_type = unassigned RNA
ccatgaaacaaagatgcagt

SEQ ID NO: 10700 - RNA, 20 nt, Homo sapiens
  source 1..20: mol_type = unassigned RNA
catgaaacaaagatgcagtc

SEQ ID NO: 10701 - RNA, 20 nt, Homo sapiens
  source 1..20: mol_type = unassigned RNA
agatgcagtcgggcactcac

SEQ ID NO: 10702 - RNA, 20 nt, Homo sapiens
  source 1..20: mol_type = unassigned RNA
gggcactcactggagagttc

SEQ ID NO: 10703 - RNA, 20 nt, Homo sapiens
  source 1..20: mol_type = unassigned RNA
ggcactcactggagagttct

SEQ ID NO: 10704 - RNA, 20 nt, Homo sapiens
  source 1..20: mol_type = unassigned RNA
ttactttactaagatggcgg

SEQ ID NO: 10705 - RNA, 20 nt, Homo sapiens
  source 1..20: mol_type = unassigned RNA
ctgttactttactaagatgg

SEQ ID NO: 10706 - RNA, 20 nt, Homo sapiens
  source 1..20: mol_type = unassigned RNA
ggactgttactttactaaga

SEQ ID NO: 10707 - RNA, 20 nt, Homo sapiens
  source 1..20: mol_type = unassigned RNA
cgactgcatctttgtttcat

SEQ ID NO: 10708 - RNA, 20 nt, Homo sapiens
  source 1..20: mol_type = unassigned RNA
ccgactgcatctttgtttca

SEQ ID NO: 10709 - RNA, 20 nt, Homo sapiens
  source 1..20: mol_type = unassigned RNA
actcacctgataagaggcag

SEQ ID NO: 10710 - RNA, 20 nt, Homo sapiens
  source 1..20: mol_type = unassigned RNA
catcctactcacctgataag

SEQ ID NO: 10711 - RNA, 20 nt, Homo sapiens
  source 1..20: mol_type = unassigned RNA
tttcttatttattttctagt

SEQ ID NO: 10712 - RNA, 20 nt, Homo sapiens
  source 1..20: mol_type = unassigned RNA
tttattttctagttggcgtt

SEQ ID NO: 10713 - RNA, 20 nt, Homo sapiens
  source 1..20: mol_type = unassigned RNA
ttattttctagttggcgttt

SEQ ID NO: 10714 - RNA, 20 nt, Homo sapiens
  source 1..20: mol_type = unassigned RNA
tattttctagttggcgtttg

SEQ ID NO: 10715 - RNA, 20 nt, Homo sapiens
  source 1..20: mol_type = unassigned RNA
attttctagttggcgtttgg

SEQ ID NO: 10716 - RNA, 20 nt, Homo sapiens
  source 1..20: mol_type = unassigned RNA
cttttcaggtaatgaagaaa

SEQ ID NO: 10717 - RNA, 20 nt, Homo sapiens
  source 1..20: mol_type = unassigned RNA
gcatataaagtctccatctc

SEQ ID NO: 10718 - RNA, 20 nt, Homo sapiens
  source 1..20: mol_type = unassigned RNA
ttgacatgccctcagtatcc

SEQ ID NO: 10719 - RNA, 20 nt, Homo sapiens
  source 1..20: mol_type = unassigned RNA
atcctggatctgaaatacta

SEQ ID NO: 10720 - RNA, 20 nt, Homo sapiens
  source 1..20: mol_type = unassigned RNA
cacaatgataaaaacatagg

SEQ ID NO: 10721 - RNA, 20 nt, Homo sapiens
  source 1..20: mol_type = unassigned RNA
taaaaacataggcggtgatg

SEQ ID NO: 10722 - RNA, 20 nt, Homo sapiens
  source 1..20: mol_type = unassigned RNA
gatgaggatgataaaaacat

SEQ ID NO: 10723 - RNA, 20 nt, Homo sapiens
  source 1..20: mol_type = unassigned RNA
taaaaacataggcagtgatg

SEQ ID NO: 10724 - RNA, 20 nt, Homo sapiens
  source 1..20: mol_type = unassigned RNA
tgaggatcacctgtcactga

SEQ ID NO: 10725 - RNA, 20 nt, Homo sapiens
  source 1..20: mol_type = unassigned RNA
actgaaggaattttcagaat

SEQ ID NO: 10726 - RNA, 20 nt, Homo sapiens
  source 1..20: mol_type = unassigned RNA
ttttcagaattggagcaaag

SEQ ID NO: 10727 - RNA, 20 nt, Homo sapiens
  source 1..20: mol_type = unassigned RNA
gaacttttatctctacctga

SEQ ID NO: 10728 - RNA, 20 nt, Homo sapiens
  source 1..20: mol_type = unassigned RNA
tattactgtggttccagaga

SEQ ID NO: 10729 - RNA, 20 nt, Homo sapiens
  source 1..20: mol_type = unassigned RNA
agggcatgtcaatattactg

SEQ ID NO: 10730 - RNA, 20 nt, Homo sapiens
  source 1..20: mol_type = unassigned RNA
tttcagatccaggatactga

SEQ ID NO: 10731 - RNA, 20 nt, Homo sapiens
  source 1..20: mol_type = unassigned RNA
atttcagatccaggatactg

SEQ ID NO: 10732 - RNA, 20 nt, Homo sapiens
  source 1..20: mol_type = unassigned RNA
tgccatagtatttcagatcc

SEQ ID NO: 10733 - RNA, 20 nt, Homo sapiens
  source 1..20: mol_type = unassigned RNA
ctgaaaattccttcagtgac

SEQ ID NO: 10734 - RNA, 20 nt, Homo sapiens
  source 1..20: mol_type = unassigned RNA
cttctggtttgcttcctctg

SEQ ID NO: 10735 - RNA, 20 nt, Homo sapiens
  source 1..20: mol_type = unassigned RNA
tcttctggtttgcttcctct

SEQ ID NO: 10736 - RNA, 20 nt, Homo sapiens
  source 1..20: mol_type = unassigned RNA
atcttctggtttgcttcctc

SEQ ID NO: 10737 - RNA, 20 nt, Homo sapiens
  source 1..20: mol_type = unassigned RNA
agataaaagttcgcatcttc

SEQ ID NO: 10738 - RNA, 20 nt, Homo sapiens
  source 1..20: mol_type = unassigned RNA
ctggattacctcttgccctc

SEQ ID NO: 10739 - RNA, 20 nt, Homo sapiens
  source 1..20: mol_type = unassigned RNA
catggagatggatgtgatgt

SEQ ID NO: 10740 - RNA, 20 nt, Homo sapiens
  source 1..20: mol_type = unassigned RNA
tagtggacatctgcatcact

SEQ ID NO: 10741 - RNA, 20 nt, Homo sapiens
  source 1..20: mol_type = unassigned RNA
gtggacatctgcatcactgg

SEQ ID NO: 10742 - RNA, 20 nt, Homo sapiens
  source 1..20: mol_type = unassigned RNA
cactgggggcttgctgctgc

SEQ ID NO: 10743 - RNA, 20 nt, Homo sapiens
  source 1..20: mol_type = unassigned RNA
ctactggagcaagaatagaa

SEQ ID NO: 10744 - RNA, 20 nt, Homo sapiens
  source 1..20: mol_type = unassigned RNA
gagcaagaatagaaaggcca

SEQ ID NO: 10745 - RNA, 20 nt, Homo sapiens
  source 1..20: mol_type = unassigned RNA
aaggccaagcctgtgacacg

SEQ ID NO: 10746 - RNA, 20 nt, Homo sapiens
  source 1..20: mol_type = unassigned RNA
caagcctgtgacacgaggag

SEQ ID NO: 10747 - RNA, 20 nt, Homo sapiens
  source 1..20: mol_type = unassigned RNA
gatgtccactatgacaattg

SEQ ID NO: 10748 - RNA, 20 nt, Homo sapiens
  source 1..20: mol_type = unassigned RNA
tcgtgtcacaggcttggcct

SEQ ID NO: 10749 - RNA, 20 nt, Homo sapiens
  source 1..20: mol_type = unassigned RNA
cgctcctcgtgtcacaggct

SEQ ID NO: 10750 - RNA, 20 nt, Homo sapiens
  source 1..20: mol_type = unassigned RNA
gcacccgctcctcgtgtcac

SEQ ID NO: 10751 - RNA, 20 nt, Homo sapiens
  source 1..20: mol_type = unassigned RNA
ccgcaggacaaaacaaggag

SEQ ID NO: 10752 - RNA, 20 nt, Homo sapiens
  source 1..20: mol_type = unassigned RNA
tctgggttgggaacaggtgg

SEQ ID NO: 10753 - RNA, 20 nt, Homo sapiens
  source 1..20: mol_type = unassigned RNA
tagtctgggttgggaacagg

SEQ ID NO: 10754 - RNA, 20 nt, Homo sapiens
  source 1..20: mol_type = unassigned RNA
tcatagtctgggttgggaac

SEQ ID NO: 10755 - RNA, 20 nt, Homo sapiens
  source 1..20: mol_type = unassigned RNA
gttacctcatagtctgggtt

SEQ ID NO: 10756 - RNA, 20 nt, Homo sapiens
  source 1..20: mol_type = unassigned RNA
cgttacctcatagtctgggt

SEQ ID NO: 10757 - RNA, 20 nt, Homo sapiens
  source 1..20: mol_type = unassigned RNA
cccacgttacctcatagtct

SEQ ID NO: 10758 - RNA, 20 nt, Homo sapiens
  source 1..20: mol_type = unassigned RNA
tcccacgttacctcatagtc

SEQ ID NO: 10759 - RNA, 20 nt, Homo sapiens
  source 1..20: mol_type = unassigned RNA
tatttcacccccagcccatc

SEQ ID NO: 10760 - RNA, 20 nt, Homo sapiens
  source 1..20: mol_type = unassigned RNA
cacccccagcccatccggaa

SEQ ID NO: 10761 - RNA, 20 nt, Homo sapiens
  source 1..20: mol_type = unassigned RNA
agcccatccggaaaggccag

SEQ ID NO: 10762 - RNA, 20 nt, Homo sapiens
  source 1..20: mol_type = unassigned RNA
gcccatccggaaaggccagc

SEQ ID NO: 10763 - RNA, 20 nt, Homo sapiens
  source 1..20: mol_type = unassigned RNA
ggccagcgggacctgtattc

SEQ ID NO: 10764 - RNA, 20 nt, Homo sapiens
  source 1..20: mol_type = unassigned RNA
cagagacgcatctgaccctc

SEQ ID NO: 10765 - RNA, 20 nt, Homo sapiens
  source 1..20: mol_type = unassigned RNA
ttacactgatacatccctcg

SEQ ID NO: 10766 - RNA, 20 nt, Homo sapiens
  source 1..20: mol_type = unassigned RNA
gcattcttttacctctcgac

SEQ ID NO: 10767 - RNA, 20 nt, Homo sapiens
  source 1..20: mol_type = unassigned RNA
tacactgatacatccctcga

SEQ ID NO: 10768 - RNA, 20 nt, Homo sapiens
  source 1..20: mol_type = unassigned RNA
atacatccctcgagggtcct

SEQ ID NO: 10769 - RNA, 20 nt, Homo sapiens
  source 1..20: mol_type = unassigned RNA
tacctggtagagctggtcat

SEQ ID NO: 10770 - RNA, 20 nt, Homo sapiens
  source 1..20: mol_type = unassigned RNA
cgagggatgtatcagtgtaa

SEQ ID NO: 10771 - RNA, 20 nt, Homo sapiens
  source 1..20: mol_type = unassigned RNA
ggtctacttcattgctggac

SEQ ID NO: 10772 - RNA, 20 nt, Homo sapiens
  source 1..20: mol_type = unassigned RNA
gtaatgccaaggaccctcga

SEQ ID NO: 10773 - RNA, 20 nt, Homo sapiens
  source 1..20: mol_type = unassigned RNA
acctggtagagctggtcatt

SEQ ID NO: 10774 - RNA, 20 nt, Homo sapiens
  source 1..20: mol_type = unassigned RNA
gcattttcgtccttgctgtt

SEQ ID NO: 10775 - RNA, 20 nt, Homo sapiens
  source 1..20: mol_type = unassigned RNA
gttggggtctacttcattgc

SEQ ID NO: 10776 - RNA, 20 nt, Homo sapiens
  source 1..20: mol_type = unassigned RNA
gtcatcttctcgatccttga

SEQ ID NO: 10777 - RNA, 20 nt, Homo sapiens
  source 1..20: mol_type = unassigned RNA
tcatcttctcgatccttgag

SEQ ID NO: 10778 - RNA, 20 nt, Homo sapiens
  source 1..20: mol_type = unassigned RNA
gtgtatgactatcaagaaga

SEQ ID NO: 10779 - RNA, 20 nt, Homo sapiens
  source 1..20: mol_type = unassigned RNA
ttcaggaaaccacttggtta

SEQ ID NO: 10780 - RNA, 20 nt, Homo sapiens
  source 1..20: mol_type = unassigned RNA
acttcgataatgaacttgca

SEQ ID NO: 10781 - RNA, 20 nt, Homo sapiens
  source 1..20: mol_type = unassigned RNA
agcatcatctcgatctcgga

SEQ ID NO: 10782 - RNA, 20 nt, Homo sapiens
  source 1..20: mol_type = unassigned RNA
gagcatcatctcgatctcgg

SEQ ID NO: 10783 - RNA, 20 nt, Homo sapiens
  source 1..20: mol_type = unassigned RNA
ggacctgggaaaacgcatcc

SEQ ID NO: 10784 - RNA, 20 nt, Homo sapiens
  source 1..20: mol_type = unassigned RNA
gacattacaagactggacct

SEQ ID NO: 10785 - RNA, 20 nt, Homo sapiens
  source 1..20: mol_type = unassigned RNA
aaacgcatcctggacccacg

SEQ ID NO: 10786 - RNA, 20 nt, Homo sapiens
  source 1..20: mol_type = unassigned RNA
ggcgagatcccaagcaagtc

SEQ ID NO: 10787 - RNA, 20 nt, Homo sapiens
  source 1..20: mol_type = unassigned RNA
actgagcatcatctcgatct

SEQ ID NO: 10788 - RNA, 20 nt, Homo sapiens
  source 1..20: mol_type = unassigned RNA
gcatcatctcgatctcggag

SEQ ID NO: 10789 - RNA, 20 nt, Homo sapiens
  source 1..20: mol_type = unassigned RNA
ccgacacacaagctctgttg

SEQ ID NO: 10790 - RNA, 20 nt, Homo sapiens
  source 1..20: mol_type = unassigned RNA
tacacctatatattcctcgt

SEQ ID NO: 10791 - RNA, 20 nt, Homo sapiens
  source 1..20: mol_type = unassigned RNA
gatacctatagaggaacttg

SEQ ID NO: 10792 - RNA, 20 nt, Homo sapiens
  source 1..20: mol_type = unassigned RNA
acaactcccacgccttgccc

SEQ ID NO: 10793 - RNA, 20 nt, Homo sapiens
  source 1..20: mol_type = unassigned RNA
ttacacctatatattcctcg

SEQ ID NO: 10794 - RNA, 20 nt, Homo sapiens
  source 1..20: mol_type = unassigned RNA
ggaacaagtgaacctgagac

SEQ ID NO: 10795 - protein, 6 aa, synthetic construct
  REGION 1..6: note = Description of Artificial Sequence: Synthetic 6xHis tag
HHHHHH

SEQ ID NO: 10796 - protein, 8 aa, synthetic construct
  REGION 1..8: note = Description of Artificial Sequence: Synthetic 8xHis tag
HHHHHHHH

SEQ ID NO: 10797 - RNA, 36 nt, synthetic construct
  misc_difference 1..20: note = modified_base - a, c, u, g, unknown or other
  misc_feature 1..36: note = Description of Artificial Sequence: Synthetic oligonucleotide
  source 1..36: mol_type = other RNA
nnnnnnnnnnnnnnnnnnnngttttagagctatgct

SEQ ID NO: 10798 - RNA, 74 nt, synthetic construct; identical to SEQ ID NO: 6660
  misc_feature 1..74: note = Description of Artificial Sequence: Synthetic oligonucleotide
  source 1..74: mol_type = other RNA

SEQ ID NO: 10799 - RNA, 100 nt, synthetic construct
  misc_difference 1..20: note = modified_base - a, c, u, g, unknown or other
  misc_feature 1..100: note = Description of Artificial Sequence: Synthetic polynucleotide
  source 1..100: mol_type = other RNA
nnnnnnnnnnnnnnnnnnnngttttagagctagaaatagcaagttaaaataaggctagtccgttatcaacttgaaaaagtggcaccgagtcggtgctttt

SEQ ID NO: 10800 - protein, 10 aa, synthetic construct
  VARIANT 1..10: note = MISC_FEATURE - This sequence may encompass 3-10 residues
  REGION 1..10: note = Description of Artificial Sequence: Synthetic His tag
HHHHHHHHHH

SEQ ID NO: 10801 - protein, 30 aa, synthetic construct
  VARIANT 1..30: note = MISC_FEATURE - This sequence may encompass 1-6 GGGGS repeating units
  REGION 1..30: note = Description of Artificial Sequence: Synthetic polypeptide
GGGGSGGGGSGGGGSGGGGSGGGGSGGGGS

SEQ ID NO: 10802 - DNA, 63 bp, synthetic construct
  misc_feature 1..63: note = Description of Artificial Sequence: Synthetic oligonucleotide
  source 1..63: mol_type = other DNA
atggccctccctgtcaccgccctgctgcttccgctggctcttctgctccacgccgctcggccc

SEQ ID NO: 10803 - DNA, 72 bp, synthetic construct
  misc_feature 1..72: note = Description of Artificial Sequence: Synthetic oligonucleotide
  source 1..72: mol_type = other DNA
atctacatttgggcccctctggctggtacttgcggggtcctgctgctttcactcgtgatcactctttactgt

SEQ ID NO: 10804 - DNA, 126 bp, synthetic construct
  misc_feature 1..126: note = Description of Artificial Sequence: Synthetic polynucleotide
  source 1..126: mol_type = other DNA
aagcgcggtcggaagaagctgctgtacatctttaagcaacccttcatgaggcctgtgcagactactcaagaggaggacggctgttcatgccggttcccagaggaggaggaaggcggctgcgaactg

SEQ ID NO: 10805 - DNA, 336 bp, synthetic construct
  misc_feature 1..336: note = Description of Artificial Sequence: Synthetic polynucleotide
  source 1..336: mol_type = other DNA
cgcgtgaaattcagccgcagcgcagatgctccagcctacaagcaggggcagaaccagctctacaacgaactcaatcttggtcggagagaggagtacgacgtgctggacaagcggagaggacgggacccagaaatgggcgggaagccgcgcagaaagaatccccaagagggcctgtacaacgagctccaaaaggataagatggcagaagcctatagcgagattggtatgaaaggggaacgcagaagaggcaaaggccacgacggactgtaccagggactcagcaccgccaccaaggacacctatgacgctcttcacatgcaggccctgccgcctcgg

SEQ ID NO: 10806 - RNA, 10 nt, synthetic construct
  misc_difference 1..10: note = misc_feature - This sequence may encompass 1-10 nucleotides
  misc_feature 1..10: note = Description of Artificial Sequence: Synthetic oligonucleotide
  source 1..10: mol_type = other RNA
tttttttttt

SEQ ID NO: 10807 - DNA, 21 bp, synthetic construct
  misc_feature 1..21: note = Description of Artificial Sequence: Synthetic primer
  source 1..21: mol_type = other DNA
cagacagcaaactcacccagt

SEQ ID NO: 10808 - DNA, 20 bp, synthetic construct
  misc_feature 1..20: note = Description of Artificial Sequence: Synthetic primer
  source 1..20: mol_type = other DNA
ctgacgcttatcgacgccct

SEQ ID NO: 10809 - RNA, 10 nt, synthetic construct
  misc_difference 1..10: note = misc_feature - This sequence may encompass 1-10 nucleotides
  misc_feature 1..10: note = Description of Artificial Sequence: Synthetic oligonucleotide
  source 1..10: mol_type = other RNA
aaaaaaaaaa

SEQ ID NO: 10810 - DNA, 33 bp, synthetic construct
  misc_feature 1..33: note = Description of Artificial Sequence: Synthetic primer
  source 1..33: mol_type = other DNA
tcgtcggcagcgtcagatgtgtataagagacag

SEQ ID NO: 10811 - DNA, 34 bp, synthetic construct
  misc_feature 1..34: note = Description of Artificial Sequence: Synthetic primer
  source 1..34: mol_type = other DNA
gtctcgtgggctcggagatgtgtataagagacag

SEQ ID NO: 10812 - DNA, 51 bp, synthetic construct
  misc_difference 30..37: note = modified_base - a, c, t, g, unknown or other
  misc_feature 1..51: note = Description of Artificial Sequence: Synthetic primer
  source 1..51: mol_type = other DNA
aatgatacggcgaccaccgagatctacacnnnnnnnntcgtcggcagcgtc

SEQ ID NO: 10813 - DNA, 47 bp, synthetic construct
  misc_difference 25..32: note = modified_base - a, c, t, g, unknown or other
  misc_feature 1..47: note = Description of Artificial Sequence: Synthetic primer
  source 1..47: mol_type = other DNA
caagcagaagacggcatacgagatnnnnnnnngtctcgtgggctcgg

SEQ ID NO: 10814 - DNA, 21 bp, synthetic construct
  misc_feature 1..21: note = Description of Artificial Sequence: Synthetic primer
  source 1..21: mol_type = other DNA
caagcagaagacggcatacga

SEQ ID NO: 10815 - DNA, 22 bp, synthetic construct
  misc_feature 1..22: note = Description of Artificial Sequence: Synthetic primer
  source 1..22: mol_type = other DNA
aatgatacggcgaccaccgaga

SEQ ID NO: 10816 - DNA, 23 bp, Homo sapiens
  source 1..23: mol_type = unassigned DNA
ggcaacagagcgagacaactggg

SEQ ID NO: 10817 - DNA, 23 bp, Homo sapiens
  source 1..23: mol_type = unassigned DNA
ggcgacagaacgagacatctcgg

SEQ ID NO: 10818 - DNA, 23 bp, Homo sapiens
  source 1..23: mol_type = unassigned DNA
aaagtcacacagctggtacatgg

SEQ ID NO: 10819 - DNA, 24 bp, synthetic construct
  misc_feature 1..24: note = Description of Artificial Sequence: Synthetic primer
  source 1..24: mol_type = other DNA
gcacgcgtttaatataagtggagg

SEQ ID NO: 10820 - DNA, 21 bp, synthetic construct
  misc_feature 1..21: note = Description of Artificial Sequence: Synthetic primer
  source 1..21: mol_type = other DNA
cctcatctgtgcagcgggcat

SEQ ID NO: 10821 - DNA, 20 bp, synthetic construct
  misc_feature 1..20: note = Description of Artificial Sequence: Synthetic primer
  source 1..20: mol_type = other DNA
catcacgagcagctggtttc

SEQ ID NO: 10822 - DNA, 20 bp, synthetic construct
  misc_feature 1..20: note = Description of Artificial Sequence: Synthetic primer
  source 1..20: mol_type = other DNA
gagccgaggtatcggtcctg

SEQ ID NO: 10823 - DNA, 24 bp, synthetic construct
  misc_feature 1..24: note = Description of Artificial Sequence: Synthetic primer
  source 1..24: mol_type = other DNA
tgtttgtaaggggatatgcacaga

SEQ ID NO: 10824 - DNA, 24 bp, synthetic construct
  misc_feature 1..24: note = Description of Artificial Sequence: Synthetic primer
  source 1..24: mol_type = other DNA
tgttgtaggtgtcaattttctgcc

SEQ ID NO: 10825 - DNA, 26 bp, synthetic construct
  misc_feature 1..26: note = Description of Artificial Sequence: Synthetic primer
  source 1..26: mol_type = other DNA
ccctctttccagaaatttccttcttc

SEQ ID NO: 10826 - DNA, 24 bp, synthetic construct
  misc_feature 1..24: note = Description of Artificial Sequence: Synthetic primer
  source 1..24: mol_type = other DNA
aatagagactcaccttgggctttc

SEQ ID NO: 10827 - DNA, 24 bp, synthetic construct
  misc_feature 1..24: note = Description of Artificial Sequence: Synthetic primer
  source 1..24: mol_type = other DNA
gccttcagttagaccttgttgatt

SEQ ID NO: 10828 - DNA, 24 bp, synthetic construct
  misc_feature 1..24: note = Description of Artificial Sequence: Synthetic primer
  source 1..24: mol_type = other DNA
tccttcttcatccaagggactttt

SEQ ID NO: 10829 - DNA, 24 bp, synthetic construct
  misc_feature 1..24: note = Description of Artificial Sequence: Synthetic primer
  source 1..24: mol_type = other DNA
ttcttcatccaagggacttttcct

SEQ ID NO: 10830 - DNA, 24 bp, synthetic construct
  misc_feature 1..24: note = Description of Artificial Sequence: Synthetic primer
  source 1..24: mol_type = other DNA
tgttgtaggtgtcaattttctgcc

SEQ ID NO: 10831 - DNA, 24 bp, synthetic construct
  misc_feature 1..24: note = Description of Artificial Sequence: Synthetic primer
  source 1..24: mol_type = other DNA
tgtaggtgtcaattttctgcctct

SEQ ID NO: 10832 - DNA, 15 bp, synthetic construct
  misc_feature 1..15: note = Description of Artificial Sequence: Synthetic primer
  source 1..15: mol_type = other DNA
gaccctcccgtcgcc

SEQ ID NO: 10833 - DNA, 23 bp, synthetic construct
  misc_feature 1..23: note = Description of Artificial Sequence: Synthetic primer
  source 1..23: mol_type = other DNA
cgaggtactaggcagagccgtgg

SEQ ID NO: 10834 - DNA, 20 bp, synthetic construct
  misc_feature 1..20: note = Description of Artificial Sequence: Synthetic primer
  source 1..20: mol_type = other DNA
ggactgccagaacaaggctc

SEQ ID NO: 10835 - DNA, 20 bp, synthetic construct
  misc_feature 1..20: note = Description of Artificial Sequence: Synthetic primer
  source 1..20: mol_type = other DNA
attcaggagagaccccaccc

SEQ ID NO: 10836 - DNA, 24 bp, synthetic construct
  misc_feature 1..24: note = Description of Artificial Sequence: Synthetic primer
  source 1..24: mol_type = other DNA
gtttcaggccattattattgcaca

SEQ ID NO: 10837 - DNA, 24 bp, synthetic construct
  misc_feature 1..24: note = Description of Artificial Sequence: Synthetic primer
  source 1..24: mol_type = other DNA
aatttcccctgattgccgtctcta

SEQ ID NO: 10838 - DNA, 23 bp, synthetic construct
  misc_feature 1..23: note = Description of Artificial Sequence: Synthetic primer
  source 1..23: mol_type = other DNA
gactgacgtggctcatgatgaat

SEQ ID NO: 10839 - DNA, 24 bp, synthetic construct
  misc_feature 1..24: note = Description of Artificial Sequence: Synthetic primer
  source 1..24: mol_type = other DNA
gtacattttaaggctcctgttggc

SEQ ID NO: 10840 - DNA, 24 bp, synthetic construct
  misc_feature 1..24: note = Description of Artificial Sequence: Synthetic primer
  source 1..24: mol_type = other DNA
gagtctctattgtacccaccttgg

SEQ ID NO: 10841 - DNA, 22 bp, synthetic construct
  misc_feature 1..22: note = Description of Artificial Sequence: Synthetic primer
  source 1..22: mol_type = other DNA
cccttgcaatgatttctgtggg

SEQ ID NO: 10842 - DNA, 23 bp, synthetic construct
  misc_feature 1..23: note = Description of Artificial Sequence: Synthetic primer
  source 1..23: mol_type = other DNA
gactgacgtggctcatgatgaat

SEQ ID NO: 10843 - DNA, 24 bp, synthetic construct
  misc_feature 1..24: note = Description of Artificial Sequence: Synthetic primer
  source 1..24: mol_type = other DNA
aatttcccctgattgccgtctcta

SEQ ID NO: 10844 - DNA, 22 bp, synthetic construct
  misc_feature 1..22: note = Description of Artificial Sequence: Synthetic primer
  source 1..22: mol_type = other DNA
gaatttcccctgattgccgtct

SEQ ID NO: 10845 - DNA, 78 bp, synthetic construct
  misc_feature 1..78: note = Description of Artificial Sequence: Synthetic oligonucleotide
  source 1..78: mol_type = other DNA
ccctgatcctcttgtcccacagatatccagaaccctgaccctgccgtaccagctgagagactctaaatccagtgacaa

SEQ ID NO: 10846 - DNA, 79 bp, synthetic construct
  misc_feature 1..79: note = Description of Artificial Sequence: Synthetic oligonucleotide
  source 1..79: mol_type = other DNA
ccctgatcctcttgtcccacagatatccagaaccctgaccctgcctgtaccagctgagagactctaaatccagtgacaa

SEQ ID NO: 10847 - DNA, 56 bp, synthetic construct
  misc_feature 1..56: note = Description of Artificial Sequence: Synthetic oligonucleotide
  source 1..56: mol_type = other DNA
ccctgatcctcttgtcccacagatatccagctgagagactctaaatccagtgacaa

SEQ ID NO: 10848 - DNA, 68 bp, synthetic construct
  misc_feature 1..68: note = Description of Artificial Sequence: Synthetic oligonucleotide
  source 1..68: mol_type = other DNA
ccctgatcctcttgtcccacagatatccagaaccctgaccagctgagagactctaaatccagtgacaa

SEQ ID NO: 10849 - DNA, 60 bp, synthetic construct
  misc_feature 1..60: note = Description of Artificial Sequence: Synthetic oligonucleotide
  source 1..60: mol_type = other DNA
ccctgatcctcttgtcccacagatatccagaaccctgagagactctaaatccagtgacaa

SEQ ID NO: 10850 - DNA, 81 bp, synthetic construct
  misc_feature 1..81: note = Description of Artificial Sequence: Synthetic oligonucleotide
  source 1..81: mol_type = other DNA
gatcctcttgtcccacagatatccagaaccctgaccctgccgtgtaaccagctgagagactctaaatccagtgacaagtct

SEQ ID NO: 10851 - DNA, 81 bp, synthetic construct
  misc_feature 1..81: note = Description of Artificial Sequence: Synthetic oligonucleotide
  source 1..81: mol_type = other DNA
gatcctcttgtcccacagatatccagaaccctgaccctgccgtgttaccagctgagagactctaaatccagtgacaagtct

SEQ ID NO: 10852 - DNA, 69 bp, synthetic construct
  misc_feature 1..69: note = Description of Artificial Sequence: Synthetic oligonucleotide
  source 1..69: mol_type = other DNA
gatcctcttgtcccacagatatccagaaccctgacccagctgagagactctaaatccagtgacaagtct

SEQ ID NO: 10853 - DNA, 36 bp, synthetic construct
  misc_feature 1..36: note = Description of Artificial Sequence: Synthetic oligonucleotide
  source 1..36: mol_type = other DNA
gatcctcttgtcccacagatatccagtgacaagtct

SEQ ID NO: 10854 - DNA, 69 bp, synthetic construct
  misc_feature 1..69: note = Description of Artificial Sequence: Synthetic oligonucleotide
  source 1..69: mol_type = other DNA
gatcctcttgtcccacagatatccagaaccctgaccctgctgagagactctaaatccagtgacaagtct

SEQ ID NO: 10855 - DNA, 75 bp, synthetic construct
  misc_feature 1..75: note = Description of Artificial Sequence: Synthetic oligonucleotide
  source 1..75: mol_type = other DNA
aacaacagcattattccagaagacaccttcttccccagcccagggcagctttggtgccttcgcaggctgtttcct

SEQ ID NO: 10856 - DNA, 65 bp, synthetic construct
  misc_feature 1..65: note = Description of Artificial Sequence: Synthetic oligonucleotide
  source 1..65: mol_type = other DNA
aacaacagcattattccagaagacaccttcttccccagctttggtgccttcgcaggctgtttcct

SEQ ID NO: 10857 - DNA, 79 bp, synthetic construct
  misc_feature 1..79: note = Description of Artificial Sequence: Synthetic oligonucleotide
  source 1..79: mol_type = other DNA
aacaacagcattattccagaagacaccttcttccccagcccaggtagggcagctttggtgccttcgcaggctgtttcct

SEQ ID NO: 10858 - DNA, 70 bp, synthetic construct
  misc_feature 1..70: note = Description of Artificial Sequence: Synthetic oligonucleotide
  source 1..70: mol_type = other DNA
aacaacagcattattccagaagacaccttcttccccagcccagctttggtgccttcgcaggctgtttcct

SEQ ID NO: 10859 - DNA, 65 bp, synthetic construct
  misc_feature 1..65: note = Description of Artificial Sequence: Synthetic oligonucleotide
  source 1..65: mol_type = other DNA
aacaacagcattattccagaagacaccttcttccccagcccaggtgccttcgcaggctgtttcct

SEQ ID NO: 10860 - DNA, 81 bp, synthetic construct
  misc_feature 1..81: note = Description of Artificial Sequence: Synthetic oligonucleotide
  source 1..81: mol_type = other DNA
tgtttttccttttagaaagttcctgtgatgtcaaagctggtcgagaaaagctttgaaacaggtaagacaggggtctagcct

SEQ ID NO: 10861 - DNA, 79 bp, synthetic construct
  misc_feature 1..79: note = Description of Artificial Sequence: Synthetic oligonucleotide
  source 1..79: mol_type = other DNA
tgtttttccttttagaaagttcctgtgatgtcagctggtcgagaaaagctttgaaacaggtaagacaggggtctagcct

SEQ ID NO: 10862 - DNA, 67 bp, synthetic construct
  misc_feature 1..67: note = Description of Artificial Sequence: Synthetic oligonucleotide
  source 1..67: mol_type = other DNA
tgtttttccttttagaaagttcctggtcgagaaaagctttgaaacaggtaagacaggggtctagcct

SEQ ID NO: 10863 - DNA, 71 bp, synthetic construct
  misc_feature 1..71: note = Description of Artificial Sequence: Synthetic oligonucleotide
  source 1..71: mol_type = other DNA
tgtttttccttttagaaagttcctgtgatgtcgagaaaagctttgaaacaggtaagacaggggtctagcct

SEQ ID NO: 10864 - DNA, 45 bp, synthetic construct
  misc_feature 1..45: note = Description of Artificial Sequence: Synthetic oligonucleotide
  source 1..45: mol_type = other DNA
tgtttttccttttagaaagaaacaggtaagacaggggtctagcct

SEQ ID NO: 10865 - DNA, 81 bp, synthetic construct
  misc_feature 1..81: note = Description of Artificial Sequence: Synthetic oligonucleotide
  source 1..81: mol_type = other DNA
gcctcttggttttacagatacgaacctaaactttcaaaacctgtcaagtgattgggttccgaatcctcctcctgaaagtgg

SEQ ID NO: 10866 - DNA, 79 bp, synthetic construct
  misc_feature 1..79: note = Description of Artificial Sequence: Synthetic oligonucleotide
  source 1..79: mol_type = other DNA
gcctcttggttttacagatacgaacctaaactttcaaaacctgtcatgattgggttccgaatcctcctcctgaaagtgg

SEQ ID NO: 10867 - DNA, 79 bp, synthetic construct
  misc_feature 1..79: note = Description of Artificial Sequence: Synthetic oligonucleotide
  source 1..79: mol_type = other DNA
gcctcttggttttacagatacgaacctaaactttcaaaacctgtcgtgattgggttccgaatcctcctcctgaaagtgg

SEQ ID NO: 10868 - DNA, 76 bp, synthetic construct
  misc_feature 1..76: note = Description of Artificial Sequence: Synthetic oligonucleotide
  source 1..76: mol_type = other DNA
gcctcttggttttacagatacgaacctaaactttcaaaacctgtcattgggttccgaatcctcctcctgaaagtgg

SEQ ID NO: 10869 - DNA, 78 bp, synthetic construct
  misc_feature 1..78: note = Description of Artificial Sequence: Synthetic oligonucleotide
  source 1..78: mol_type = other DNA
gcctcttggttttacagatacgaacctaaactttcaaaacctgtcagattgggttccgaatcctcctcctgaaagtgg

SEQ ID NO: 10870 - DNA, 81 bp, synthetic construct
  misc_feature 1..81: note = Description of Artificial Sequence: Synthetic oligonucleotide
  source 1..81: mol_type = other DNA
tgtcagtgattgggttccgaatcctcctcctgaaagtggccgggttttaatctgctcatgacgctgcggctgtggtccagc

SEQ ID NO: 10871 - DNA, 79 bp, synthetic construct
  misc_feature 1..79: note = Description of Artificial Sequence: Synthetic oligonucleotide
  source 1..79: mol_type = other DNA
tgtcagtgattgggttccgaatcctcctcctgaaagtggccgggttaatctgctcatgacgctgcggctgtggtccagc

SEQ ID NO: 10872 - DNA, 80 bp, synthetic construct
  misc_feature 1..80: note = Description of Artificial Sequence: Synthetic oligonucleotide
  source 1..80: mol_type = other DNA
tgtcagtgattgggttccgaatccgcctcctgaaagtggccgggtttaatctgctcatgacgctgcggctgtggtccagc

SEQ ID NO: 10873 - DNA, 80 bp, synthetic construct
  misc_feature 1..80: note = Description of Artificial Sequence: Synthetic oligonucleotide
  source 1..80: mol_type = other DNA
tgtcagtgattgggttccgaatcctccgcctgaaagtggccgggtttaatctgctcatgacgctgcggctgtggtccagc

SEQ ID NO: 10874 - DNA, 66 bp, synthetic construct
  misc_feature 1..66: note = Description of Artificial Sequence: Synthetic oligonucleotide
  source 1..66: mol_type = other DNA
tgtcagtgattgggttccgaatcctcctcctgaaagtggctcatgacgctgcggctgtggtccagc

SEQ ID NO: 10875 - DNA, 81 bp, synthetic construct; identical to SEQ ID NO: 10850
  misc_feature 1..81: note = Description of Artificial Sequence: Synthetic oligonucleotide
  source 1..81: mol_type = other DNA

SEQ ID NO: 10876 - DNA, 81 bp, synthetic construct; identical to SEQ ID NO: 10851
  misc_feature 1..81: note = Description of Artificial Sequence: Synthetic oligonucleotide
  source 1..81: mol_type = other DNA

SEQ ID NO: 10877 - DNA, 69 bp, synthetic construct; identical to SEQ ID NO: 10852
  misc_feature 1..69: note = Description of Artificial Sequence: Synthetic oligonucleotide
  source 1..69: mol_type = other DNA

SEQ ID NO: 10878 - DNA, 73 bp, synthetic construct
  misc_feature 1..73: note = Description of Artificial Sequence: Synthetic oligonucleotide
  source 1..73: mol_type = other DNA
gatcctcttgtcccacagatatccagaaccctgaccctgccagctgagagactctaaatccagtgacaagtct

SEQ ID NO: 10879 - DNA, 81 bp, synthetic construct
  misc_feature 1..81: note = Description of Artificial Sequence: Synthetic oligonucleotide
  source 1..81: mol_type = other DNA
gatcctcttgtcccacagatatccagaaccctgaccctgccgtgtgaccagctgagagactctaaatccagtgacaagtct

SEQ ID NO: 10880 - DNA, 75 bp, synthetic construct; identical to SEQ ID NO: 10855
  misc_feature 1..75: note = Description of Artificial Sequence: Synthetic oligonucleotide
  source 1..75: mol_type = other DNA

SEQ ID NO: 10881 - DNA, 65 bp, synthetic construct; identical to SEQ ID NO: 10856
  misc_feature 1..65: note = Description of Artificial Sequence: Synthetic oligonucleotide
  source 1..65: mol_type = other DNA

SEQ ID NO: 10882 - DNA, 70 bp, synthetic construct; identical to SEQ ID NO: 10858
  misc_feature 1..70: note = Description of Artificial Sequence: Synthetic oligonucleotide
  source 1..70: mol_type = other DNA

SEQ ID NO: 10883 - DNA, 79 bp, synthetic construct; identical to SEQ ID NO: 10857
  misc_feature 1..79: note = Description of Artificial Sequence: Synthetic oligonucleotide
  source 1..79: mol_type = other DNA

SEQ ID NO: 10884 - DNA, 65 bp, synthetic construct; identical to SEQ ID NO: 10859
  misc_feature 1..65: note = Description of Artificial Sequence: Synthetic oligonucleotide
  source 1..65: mol_type = other DNA

SEQ ID NO: 10885 - DNA, 79 bp, synthetic construct
  misc_feature 1..79: note = Description of Artificial Sequence: Synthetic oligonucleotide
  source 1..79: mol_type = other DNA
ctttcaaaacctgtcagtgattgggttccgaatcctcctcctgaagtggccgggtttaatctgctcatgacgctgcggc

SEQ ID NO: 10886 - DNA, 79 bp, synthetic construct
  misc_feature 1..79: note = Description of Artificial Sequence: Synthetic oligonucleotide
  source 1..79: mol_type = other DNA
ctttcaaaacctgtcagtgattgggttccgaatcctcctcctgaaatggccgggtttaatctgctcatgacgctgcggc

SEQ ID NO: 10887 - DNA, 82 bp, synthetic construct
  misc_feature 1..82: note = Description of Artificial Sequence: Synthetic oligonucleotide
  source 1..82: mol_type = other DNA
ctttcaaaacctgtcagtgattgggttccgaatcctcctcctgaaaaagtggccgggtttaatctgctcatgacgctgcggc

SEQ ID NO: 10888 - DNA, 78 bp, synthetic construct
  misc_feature 1..78: note = Description of Artificial Sequence: Synthetic oligonucleotide
  source 1..78: mol_type = other DNA
ctttcaaaacctgtcagtgattgggttccgaatcctcctcctgaatggccgggtttaatctgctcatgacgctgcggc

SEQ ID NO: 10889 - DNA, 81 bp, synthetic construct
  misc_feature 1..81: note = Description of Artificial Sequence: Synthetic oligonucleotide
  source 1..81: mol_type = other DNA
ctttcaaaacctgtcagtgattgggttccgaatcctcctcctgaaaagtggccgggtttaatctgctcatgacgctgcggc

SEQ ID NO: 10890 - DNA, 79 bp, synthetic construct; identical to SEQ ID NO: 10871
  misc_feature 1..79: note = Description of Artificial Sequence: Synthetic oligonucleotide
  source 1..79: mol_type = other DNA

SEQ ID NO: 10891 - DNA, 81 bp, synthetic construct; identical to SEQ ID NO: 10870
  misc_feature 1..81: note = Description of Artificial Sequence: Synthetic oligonucleotide
  source 1..81: mol_type = other DNA

SEQ ID NO: 10892 - DNA, 78 bp, synthetic construct
  misc_feature 1..78: note = Description of Artificial Sequence: Synthetic oligonucleotide
  source 1..78: mol_type = other DNA
tgtcagtgattgggttccgaatcctcctcctgaaagtggccgggtaatctgctcatgacgctgcggctgtggtccagc

SEQ ID NO: 10893 - DNA, 66 bp, synthetic construct; identical to SEQ ID NO: 10874
  misc_feature 1..66: note = Description of Artificial Sequence: Synthetic oligonucleotide
  source 1..66: mol_type = other DNA

SEQ ID NO: 10894 - DNA, 65 bp, synthetic construct
  misc_feature 1..65: note = Description of Artificial Sequence: Synthetic oligonucleotide
  source 1..65: mol_type = other DNA
tgtcagtgattgggttccgaatcctcctcctgaaagtgctcatgacgctgcggctgtggtccagc

SEQ ID NO: 10895 - DNA, 68 bp, synthetic construct
  misc_feature 1..68: note = Description of Artificial Sequence: Synthetic oligonucleotide
  source 1..68: mol_type = other DNA
ctcctgaaagtggccgggtttaatctgcggctgtggtccagctgaggtgaggggccttgaagctggga

SEQ ID NO: 10896 - DNA, 81 bp, synthetic construct
  misc_feature 1..81: note = Description of Artificial Sequence: Synthetic oligonucleotide
  source 1..81: mol_type = other DNA
ctcctgaaagtggccgggtttaatctgctcatgacggctgcggctgtggtccagctgaggtgaggggccttgaagctggga

SEQ ID NO: 10897 - DNA, 78 bp, synthetic construct
  misc_feature 1..78: note = Description of Artificial Sequence: Synthetic oligonucleotide
  source 1..78: mol_type = other DNA
ctcctgaaagtggccgggtttaatctgctcatgactgcggctgtggtccagctgaggtgaggggccttgaagctggga

SEQ ID NO: 10898 - DNA, 79 bp, synthetic construct
  misc_feature 1..79: note = Description of Artificial Sequence: Synthetic oligonucleotide
  source 1..79: mol_type = other DNA
ctcctgaaagtggccgggtttaatctgctcatgacctgcggctgtggtccagctgaggtgaggggccttgaagctggga

SEQ ID NO: 10899 - DNA, 74 bp, synthetic construct
  misc_feature 1..74: note = Description of Artificial Sequence: Synthetic oligonucleotide
  source 1..74: mol_type = other DNA
ctcctgaaagtggccgggtttaatctgctcatgcggctgtggtccagctgaggtgaggggccttgaagctggga

SEQ ID NO: 10900 - DNA, 57 bp, synthetic construct
  misc_feature 1..57: note = Description of Artificial Sequence: Synthetic oligonucleotide
  source 1..57: mol_type = other DNA
gaagctgacagcattcgggccgagatgtctcgcgctactctctctttctggcctgga

SEQ ID NO: 10901 - DNA, 81 bp, synthetic construct
  misc_feature 1..81: note = Description of Artificial Sequence: Synthetic oligonucleotide
  source 1..81: mol_type = other DNA
gaagctgacagcattcgggccgagatgtctcgctccgtggccttagcctgtgctcgcgctactctctctttctggcctgga

SEQ ID NO: 10902 - DNA, 63 bp, synthetic construct
  misc_feature 1..63: note = Description of Artificial Sequence: Synthetic oligonucleotide
  source 1..63: mol_type = other DNA
gaagctgacagcattcgggccgagatgtctcgctccgtggctactctctctttctggcctgga

SEQ ID NO: 10903 - DNA, 55 bp, synthetic construct
  misc_feature 1..55: note = Description of Artificial Sequence: Synthetic oligonucleotide
  source 1..55: mol_type = other DNA
gaagctgacagcattcgggccgagatgtctcgctactctctctttctggcctgga

SEQ ID NO: 10904 - DNA, 77 bp, synthetic construct
  misc_feature 1..77: note = Description of Artificial Sequence: Synthetic oligonucleotide
  source 1..77: mol_type = other DNA
gaagctgacagcattcgggccgagatgtctcgctccgtggccttagtgctcgcgctactctctctttctggcctgga

SEQ ID NO: 10905 - DNA, 69 bp, synthetic construct
  misc_feature 1..69: note = Description of Artificial Sequence: Synthetic oligonucleotide
  source 1..69: mol_type = other DNA
gaagctgacagcattcgggccgagatgtctcgctccgtggctcgcgctactctctctttctggcctgga

SEQ ID NO: 10906 - DNA, 61 bp, synthetic construct
  misc_feature 1..61: note = Description of Artificial Sequence: Synthetic oligonucleotide
  source 1..61: mol_type = other DNA
gaagctgacagcattcgggccgagatgtctcgctcgcgctactctctctttctggcctgga

SEQ ID NO: 10907 - DNA, 82 bp, synthetic construct
  misc_feature 1..82: note = Description of Artificial Sequence: Synthetic oligonucleotide
  source 1..82: mol_type = other DNA
gaagctgacagcattcgggccgagatgtctcgctccgtggccttagctctgtgctcgcgctactctctctttctggcctgga

SEQ ID NO: 10908 - DNA, 65 bp, synthetic construct
  misc_feature 1..65: note = Description of Artificial Sequence: Synthetic oligonucleotide
  source 1..65: mol_type = other DNA
gaagctgacagcattcgggccgagatgtctcgctccgtggcgctactctctctttctggcctgga

SEQ ID NO: 10909 - DNA, 75 bp, synthetic construct
  misc_feature 1..75: note = Description of Artificial Sequence: Synthetic oligonucleotide
  source 1..75: mol_type = other DNA
gaagctgacagcattcgggccgagatgtctcgctccgtggccttagctcgcgctactctctctttctggcctgga

SEQ ID NO: 10910 - DNA, 76 bp, synthetic construct
  misc_feature 1..76: note = Description of Artificial Sequence: Synthetic oligonucleotide
  source 1..76: mol_type = other DNA
ccgtgtgaaccatgtgactttgtcacagcccaagttaagtggggtaagtcttacattcttttgtaagctgctgaaa

SEQ ID NO: 10911 - DNA, 81 bp, synthetic construct
  misc_feature 1..81: note = Description of Artificial Sequence: Synthetic oligonucleotide
  source 1..81: mol_type = other DNA
ccgtgtgaaccatgtgactttgtcacagcccaagaatagttaagtggggtaagtcttacattcttttgtaagctgctgaaa

SEQ ID NO: 10912 - DNA, 64 bp, synthetic construct
  misc_feature 1..64: note = Description of Artificial Sequence: Synthetic oligonucleotide
  source 1..64: mol_type = other DNA
ccgtgtgaaccatgtgactttgttaagtggggtaagtcttacattcttttgtaagctgctgaaa

SEQ ID NO: 10913 - DNA, 71 bp, synthetic construct
  misc_feature 1..71: note = Description of Artificial Sequence: Synthetic oligonucleotide
  source 1..71: mol_type = other DNA
ccgtgtgaaccatgtgactttgtcacagcccaagtggggtaagtcttacattcttttgtaagctgctgaaa

SEQ ID NO: 10914 - DNA, 50 bp, synthetic construct
  misc_feature 1..50: note = Description of Artificial Sequence: Synthetic oligonucleotide
  source 1..50: mol_type = other DNA
ccgtgtgaaccatgtgactttgtcttacattcttttgtaagctgctgaaa

SEQ ID NO: 10915 - DNA, 59 bp, synthetic construct
  misc_feature 1..59: note = Description of Artificial Sequence: Synthetic oligonucleotide
  source 1..59: mol_type = other DNA
ccgtgtgaaccatgtgactttgtggggtaagtcttacattcttttgtaagctgctgaaa

SEQ ID NO: 10916 - DNA, 44 bp, synthetic construct
  misc_feature 1..44: note = Description of Artificial Sequence: Synthetic oligonucleotide
  source 1..44: mol_type = other DNA
ccgtgtgaaccatgtgacttacattcttttgtaagctgctgaaa

SEQ ID NO: 10917 - DNA, 79 bp, synthetic construct
  misc_feature 1..79: note = Description of Artificial Sequence: Synthetic oligonucleotide
  source 1..79: mol_type = other DNA
ccgtgtgaaccatgtgactttgtcacagcccaagtagttaagtggggtaagtcttacattcttttgtaagctgctgaaa

SEQ ID NO: 10918 - DNA, 51 bp, synthetic construct
  misc_feature 1..51: note = Description of Artificial Sequence: Synthetic oligonucleotide
  source 1..51: mol_type = other DNA
ccgtgtgaaccatgtggggtaagtcttacattcttttgtaagctgctgaaa

SEQ ID NO: 10919 - DNA, 78 bp, synthetic construct
  misc_feature 1..78: note = Description of Artificial Sequence: Synthetic oligonucleotide
  source 1..78: mol_type = other DNA
ccgtgtgaaccatgtgactttgtcacagcccaagagttaagtggggtaagtcttacattcttttgtaagctgctgaaa

SEQ ID NO: 10920 - DNA, 81 bp, synthetic construct
  misc_feature 1..81: note = Description of Artificial Sequence: Synthetic oligonucleotide
  source 1..81: mol_type = other DNA
agctcacagtgtgccaccatggagttggggccccttagaaggtggctacctggagcttcttaacagcgatgctgaccccct

SEQ ID NO: 10921 - DNA, 64 bp, synthetic construct
  misc_feature 1..64: note = Description of Artificial Sequence: Synthetic oligonucleotide
  source 1..64: mol_type = other DNA
agctcacagtgtgccaccatggagttggctacctggagcttcttaacagcgatgctgaccccct

SEQ ID NO: 10922 - DNA, 66 bp, synthetic construct
  misc_feature 1..66: note = Description of Artificial Sequence: Synthetic oligonucleotide
  source 1..66: mol_type = other DNA
agctcacagtgtgccaccatggagttggggctacctggagcttcttaacagcgatgctgaccccct

SEQ ID NO: 10923 - DNA, 76 bp, synthetic construct
  misc_feature 1..76: note = Description of Artificial Sequence: Synthetic oligonucleotide
  source 1..76: mol_type = other DNA
agctcacagtgtgccaccatggagttggggtagaaggtggctacctggagcttcttaacagcgatgctgaccccct

SEQ ID NO: 10924 - DNA, 50 bp, synthetic construct
  misc_feature 1..50: note = Description of Artificial Sequence: Synthetic oligonucleotide
  source 1..50: mol_type = other DNA
agctcacagtgtgccaccatggagcttcttaacagcgatgctgaccccct

SEQ ID NO: 10925 - DNA, 81 bp, synthetic construct
  misc_feature 1..81: note = Description of Artificial Sequence: Synthetic oligonucleotide
  source 1..81: mol_type = other DNA
aactgcgaccagttcagcaggctgttgtgtgacattggaaggtgatgaagagaccagggaggcttatgccaatatcggtga

SEQ ID NO: 10926 - DNA, 68 bp, synthetic construct
  misc_feature 1..68: note = Description of Artificial Sequence: Synthetic oligonucleotide
  source 1..68: mol_type = other DNA
aactgcgaccagttcagcaggctgttgtgtgatgaagagaccagggaggcttatgccaatatcggtga

SEQ ID NO: 10927 - DNA, 79 bp, synthetic construct
  misc_feature 1..79: note = Description of Artificial Sequence: Synthetic oligonucleotide
  source 1..79: mol_type = other DNA
aactgcgaccagttcagcaggctgttgtgtgactggaaggtgatgaagagaccagggaggcttatgccaatatcggtga

SEQ ID NO: 10928 - DNA, 79 bp, synthetic construct
  misc_feature 1..79: note = Description of Artificial Sequence: Synthetic oligonucleotide
  source 1..79: mol_type = other DNA
aactgcgaccagttcagcaggctgttgtgtgacaggaaggtgatgaagagaccagggaggcttatgccaatatcggtga

SEQ ID NO: 10929 - DNA, 78 bp, synthetic construct
  misc_feature 1..78: note = Description of Artificial Sequence: Synthetic oligonucleotide
  source 1..78: mol_type = other DNA
aactgcgaccagttcagcaggctgttgtgtgatggaaggtgatgaagagaccagggaggcttatgccaatatcggtga

SEQ ID NO: 10930 - DNA, 79 bp, synthetic construct
  misc_feature 1..79: note = Description of Artificial Sequence: Synthetic oligonucleotide
  source 1..79: mol_type = other DNA
caggctgttgtgtgacatggaaggtgatgaagagccagggaggcttatgccaatatcggtgaggaagcacctgagccca

SEQ ID NO: 10931 - DNA, 81 bp, synthetic construct
  misc_feature 1..81: note = Description of Artificial Sequence: Synthetic oligonucleotide
  source 1..81: mol_type = other DNA
caggctgttgtgtgacatggaaggtgatgaagagaaccagggaggcttatgccaatatcggtgaggaagcacctgagccca

SEQ ID NO: 10932 - DNA, 60 bp, synthetic construct
  misc_feature 1..60: note = Description of Artificial Sequence: Synthetic oligonucleotide
  source 1..60: mol_type = other DNA
caggctgttgtgtgacatggaaggcttatgccaatatcggtgaggaagcacctgagccca

SEQ ID NO: 10933 - DNA, 59 bp, synthetic construct
  misc_feature 1..59: note = Description of Artificial Sequence: Synthetic oligonucleotide
  source 1..59: mol_type = other DNA
caggctgttgtgtgacagggaggcttatgccaatatcggtgaggaagcacctgagccca

SEQ ID NO: 10934 - DNA, 44 bp, synthetic construct
  misc_feature 1..44: note = Description of Artificial Sequence: Synthetic oligonucleotide
  source 1..44: mol_type = other DNA
caggctgttgtgtgacatggaaggtgaggaggcacctgagccca

SEQ ID NO: 10935 - DNA, 81 bp, synthetic construct
  misc_feature 1..81: note = Description of Artificial Sequence: Synthetic oligonucleotide
  source 1..81: mol_type = other DNA
tttctcaaagtagagcacataggaccagatgaagttgatcggtgagagtatggagatgccagcagaagttgggcagaaaag

SEQ ID NO: 10936 - DNA, 68 bp, synthetic construct
  misc_feature 1..68: note = Description of Artificial Sequence: Synthetic oligonucleotide
  source 1..68: mol_type = other DNA
tttctcaaagtagagcacataggaccagatgagagtatggagatgccagcagaagttgggcagaaaag

SEQ ID NO: 10937 - DNA, 72 bp, synthetic construct
  misc_feature 1..72: note = Description of Artificial Sequence: Synthetic oligonucleotide
  source 1..72: mol_type = other DNA
tttctcaaagtagagcacataggaccagatcggtgagagtatggagatgccagcagaagttgggcagaaaag

SEQ ID NO: 10938 - DNA, 63 bp, synthetic construct
  misc_feature 1..63: note = Description of Artificial Sequence: Synthetic oligonucleotide
  source 1..63: mol_type = other DNA
tttctcaaagtagagcacataggaccagagtatggagatgccagcagaagttgggcagaaaag

SEQ ID NO: 10939 - DNA, 75 bp, synthetic construct
  misc_feature 1..75: note = Description of Artificial Sequence: Synthetic oligonucleotide
  source 1..75: mol_type = other DNA
tttctcaaagtagagcacataggaccagatgatcggtgagagtatggagatgccagcagaagttgggcagaaaag

SEQ ID NO: 10940 - DNA, 63 bp, synthetic construct
  misc_feature 1..63: note = Description of Artificial Sequence: Synthetic oligonucleotide
  source 1..63: mol_type = other DNA
tgagcattgtcttccctcccaggcagctcacagtgtgcccctagaaggtggctacctggagct

SEQ ID NO: 10941 - DNA, 81 bp, synthetic construct
  misc_feature 1..81: note = Description of Artificial Sequence: Synthetic oligonucleotide
  source 1..81: mol_type = other DNA
tgagcattgtcttccctcccaggcagctcacagtgtgccaccattggagttggggcccctagaaggtggctacctggagct

SEQ ID NO: 10942 - DNA, 79 bp, synthetic construct
  misc_feature 1..79: note = Description of Artificial Sequence: Synthetic oligonucleotide
  source 1..79: mol_type = other DNA
tgagcattgtcttccctcccaggcagctcacagtgtgccaccaggagttggggcccctagaaggtggctacctggagct

SEQ ID NO: 10943 - DNA, 78 bp, synthetic construct
  misc_feature 1..78: note = Description of Artificial Sequence: Synthetic oligonucleotide
  source 1..78: mol_type = other DNA
tgagcattgtcttccctcccaggcagctcacagtgtgccaccagagttggggcccctagaaggtggctacctggagct

SEQ ID NO: 10944 - DNA, 49 bp, synthetic construct
  misc_feature 1..49: note = Description of Artificial Sequence: Synthetic oligonucleotide
  source 1..49: mol_type = other DNA
tgagcattgtcttccctcccaggcccctagaaggtggctacctggagct

SEQ ID NO: 10945 - DNA, 79 bp, synthetic construct
  misc_feature 1..79: note = Description of Artificial Sequence: Synthetic oligonucleotide
  source 1..79: mol_type = other DNA
gggggtcagcatcgctgttaagaagctccaggtagccacctctaggggccccaactccatggtggcacactgtgagctg

SEQ ID NO: 10946 - DNA, 78 bp, synthetic construct
  misc_feature 1..78: note = Description of Artificial Sequence: Synthetic oligonucleotide
  source 1..78: mol_type = other DNA
gggggtcagcatcgctgttaagaagctccaggtagccactctaggggccccaactccatggtggcacactgtgagctg

SEQ ID NO: 10947 - DNA, 66 bp, synthetic construct
  misc_feature 1..66: note = Description of Artificial Sequence: Synthetic oligonucleotide
  source 1..66: mol_type = other DNA
gggggtcagcatcgctgttaagaagctccaggtagccccaactccatggtggcacactgtgagctg

SEQ ID NO: 10948 - DNA, 81 bp, synthetic construct
  misc_feature 1..81: note = Description of Artificial Sequence: Synthetic oligonucleotide
  source 1..81: mol_type = other DNA
gggggtcagcatcgctgttaagaagctccaggtagccacctttctaggggccccaactccatggtggcacactgtgagctg

SEQ ID NO: 10949 - DNA, 77 bp, synthetic construct
  misc_feature 1..77: note = Description of Artificial Sequence: Synthetic oligonucleotide
  source 1..77: mol_type = other DNA
gggggtcagcatcgctgttaagaagctccaggtagccatctaggggccccaactccatggtggcacactgtgagctg

SEQ ID NO: 10950 - DNA, 81 bp, synthetic construct
  misc_feature 1..81: note = Description of Artificial Sequence: Synthetic oligonucleotide
  source 1..81: mol_type = other DNA
ggtggctacctggagcttcttaacagcgatgctgaccccctgtggcctctaccacttctatgaccagatggacctggctgg

SEQ ID NO: 10951 - DNA, 74 bp, synthetic construct
  misc_feature 1..74: note = Description of Artificial Sequence: Synthetic oligonucleotide
  source 1..74: mol_type = other DNA
ggtggctacctggagcttcttaacagcgatgctgaccccctctaccacttctatgaccagatggacctggctgg

SEQ ID NO: 10952 - DNA, 65 bp, synthetic construct
  misc_feature 1..65: note = Description of Artificial Sequence: Synthetic oligonucleotide
  source 1..65: mol_type = other DNA
ggtggctacctggagcttcttaacagcgatgctgaccacttctatgaccagatggacctggctgg

SEQ ID NO: 10953 - DNA, 79 bp, synthetic construct
  misc_feature 1..79: note = Description of Artificial Sequence: Synthetic oligonucleotide
  source 1..79: mol_type = other DNA
ggtggctacctggagcttcttaacagcgatgctgaccccctgtgctctaccacttctatgaccagatggacctggctgg

SEQ ID NO: 10954 - DNA, 77 bp, synthetic construct
  misc_feature 1..77: note = Description of Artificial Sequence: Synthetic oligonucleotide
  source 1..77: mol_type = other DNA
ggtggctacctggagcttcttaacagcgatgctgaccccctgtgctaccacttctatgaccagatggacctggctgg

SEQ ID NO: 10955 - DNA, 68 bp, synthetic construct
  misc_feature 1..68: note = Description of Artificial Sequence: Synthetic oligonucleotide
  source 1..68: mol_type = other DNA
agcttcttaacagcgatgctgaccccctgtgcctctaccagatggacctggctggagaagaagagatt

SEQ ID NO: 10956 - DNA, 77 bp, synthetic construct
  misc_feature 1..77: note = Description of Artificial Sequence: Synthetic oligonucleotide
  source 1..77: mol_type = other DNA
agcttcttaacagcgatgctgaccccctgtgcctctaccactatgaccagatggacctggctggagaagaagagatt

SEQ ID NO: 10957 - DNA, 62 bp, synthetic construct
  misc_feature 1..62: note = Description of Artificial Sequence: Synthetic oligonucleotide
  source 1..62: mol_type = other DNA
agcttcttaacagcgatgctgaccccctgtgccagatggacctggctggagaagaagagatt

SEQ ID NO: 10958 - DNA, 78 bp, synthetic construct
  misc_feature 1..78: note = Description of Artificial Sequence: Synthetic oligonucleotide
  source 1..78: mol_type = other DNA
agcttcttaacagcgatgctgaccccctgtgcctctaccacttatgaccagatggacctggctggagaagaagagatt

SEQ ID NO: 10959 - DNA, 79 bp, synthetic construct
  misc_feature 1..79: note = Description of Artificial Sequence: Synthetic oligonucleotide
  source 1..79: mol_type = other DNA
agcttcttaacagcgatgctgaccccctgtgcctctaccactttatgaccagatggacctggctggagaagaagagatt

SEQ ID NO: 10960 - DNA, 81 bp, synthetic construct
  misc_feature 1..81: note = Description of Artificial Sequence: Synthetic oligonucleotide
  source 1..81: mol_type = other DNA
tttttctcaaagtagagcacataggaccagatgaagttgatcggtgagagtatggagatgccagcagaagttgggcagaaa

SEQ ID NO: 10961 - DNA, 68 bp, synthetic construct
  misc_feature 1..68: note = Description of Artificial Sequence: Synthetic oligonucleotide
  source 1..68: mol_type = other DNA
tttttctcaaagtagagcacataggaccagatgagagtatggagatgccagcagaagttgggcagaaa

SEQ ID NO: 10962 - DNA, 72 bp, synthetic construct
  misc_feature 1..72: note = Description of Artificial Sequence: Synthetic oligonucleotide
  source 1..72: mol_type = other DNA
tttttctcaaagtagagcacataggaccagatcggtgagagtatggagatgccagcagaagttgggcagaaa

SEQ ID NO: 10963 - DNA, 78 bp, synthetic construct
  misc_feature 1..78: note = Description of Artificial Sequence: Synthetic oligonucleotide
  source 1..78: mol_type = other DNA
tttttctcaaagtagagcacataggaccagatgatgatcggtgagagtatggagatgccagcagaagttgggcagaaa

SEQ ID NO: 10964 - DNA, 77 bp, synthetic construct
  misc_feature 1..77: note = Description of Artificial Sequence: Synthetic oligonucleotide
  source 1..77: mol_type = other DNA
tttttctcaaagtagagcacataggaccagatgtgatcggtgagagtatggagatgccagcagaagttgggcagaaa

SEQ ID NO: 10965 - DNA, 77 bp, synthetic construct
  misc_feature 1..77: note = Description of Artificial Sequence: Synthetic oligonucleotide
  source 1..77: mol_type = other DNA
gcattgtcttccctcccaggcagctcacagtgtgccatggagttggggcccctagaaggtggctacctggagcttct

SEQ ID NO: 10966 - DNA, 81 bp, synthetic construct
  misc_feature 1..81: note = Description of Artificial Sequence: Synthetic oligonucleotide
  source 1..81: mol_type = other DNA
gcattgtcttccctcccaggcagctcacagtgtgccaaccatggagttggggcccctagaaggtggctacctggagcttct

SEQ ID NO: 10967 - DNA, 78 bp, synthetic construct
  misc_feature 1..78: note = Description of Artificial Sequence: Synthetic oligonucleotide
  source 1..78: mol_type = other DNA
gcattgtcttccctcccaggcagctcacagtgtgccaatggagttggggcccctagaaggtggctacctggagcttct

SEQ ID NO: 10968 - DNA, 79 bp, synthetic construct
  misc_feature 1..79: note = Description of Artificial Sequence: Synthetic oligonucleotide
  source 1..79: mol_type = other DNA
gcattgtcttccctcccaggcagctcacagtgtgccccatggagttggggcccctagaaggtggctacctggagcttct

SEQ ID NO: 10969 - DNA, 79 bp, synthetic construct
  misc_feature 1..79: note = Description of Artificial Sequence: Synthetic oligonucleotide
  source 1..79: mol_type = other DNA
gcattgtcttccctcccaggcagctcacagtgtgccacatggagttggggcccctagaaggtggctacctggagcttct

SEQ ID NO: 10970 - DNA, 81 bp, synthetic construct
  misc_feature 1..81: note = Description of Artificial Sequence: Synthetic oligonucleotide
  source 1..81: mol_type = other DNA
gcagctcacagtgtgccaccatggagttggggccccttagaaggtggctacctggagcttcttaacagcgatgctgacccc

SEQ ID NO: 10971 - DNA, 79 bp, synthetic construct
  misc_feature 1..79: note = Description of Artificial Sequence: Synthetic oligonucleotide
  source 1..79: mol_type = other DNA
gcagctcacagtgtgccaccatggagttggggccccagaaggtggctacctggagcttcttaacagcgatgctgacccc

SEQ ID NO: 10972 - DNA, 76 bp, synthetic construct
  misc_feature 1..76: note = Description of Artificial Sequence: Synthetic oligonucleotide
  source 1..76: mol_type = other DNA
gcagctcacagtgtgccaccatggagttggggtagaaggtggctacctggagcttcttaacagcgatgctgacccc

SEQ ID NO: 10973 - DNA, 50 bp, synthetic construct
  misc_feature 1..50: note = Description of Artificial Sequence: Synthetic oligonucleotide
  source 1..50: mol_type = other DNA
gcagctcacagtgtgccaccatggagcttcttaacagcgatgctgacccc

SEQ ID NO: 10974 - DNA, 64 bp, synthetic construct
  misc_feature 1..64: note = Description of Artificial Sequence: Synthetic oligonucleotide
  source 1..64: mol_type = other DNA
gcagctcacagtgtgccaccatggagttggctacctggagcttcttaacagcgatgctgacccc

SEQ ID NO: 10975 - DNA, 81 bp, synthetic construct; identical to SEQ ID NO: 10970
  misc_feature 1..81: note = Description of Artificial Sequence: Synthetic oligonucleotide
  source 1..81: mol_type = other DNA

SEQ ID NO: 10976 - DNA, 76 bp, synthetic construct; identical to SEQ ID NO: 10972
  misc_feature 1..76: note = Description of Artificial Sequence: Synthetic oligonucleotide
  source 1..76: mol_type = other DNA

SEQ ID NO: 10977 - DNA, 79 bp, synthetic construct; identical to SEQ ID NO: 10971
  misc_feature 1..79: note = Description of Artificial Sequence: Synthetic oligonucleotide
  source 1..79: mol_type = other DNA

SEQ ID NO: 10978 - DNA, 50 bp, synthetic construct; identical to SEQ ID NO: 10973
  misc_feature 1..50: note = Description of Artificial Sequence: Synthetic oligonucleotide
  source 1..50: mol_type = other DNA

SEQ ID NO: 10979 - DNA, 66 bp, synthetic construct
  misc_feature 1..66: note = Description of Artificial Sequence: Synthetic oligonucleotide
  source 1..66: mol_type = other DNA
gcagctcacagtgtgccaccatggagttggggctacctggagcttcttaacagcgatgctgacccc

SEQ ID NO: 10980 - DNA, 75 bp, synthetic construct
  misc_feature 1..75: note = Description of Artificial Sequence: Synthetic oligonucleotide
  source 1..75: mol_type = other DNA
gcagctcacagtgtgccaccatggagttgggtagaaggtggctacctggagcttcttaacagcgatgctgacccc

SEQ ID NO: 10981 - DNA, 64 bp, synthetic construct; identical to SEQ ID NO: 10974
  misc_feature 1..64: note = Description of Artificial Sequence: Synthetic oligonucleotide
  source 1..64: mol_type = other DNA

SEQ ID NO: 10982 - DNA, 49 bp, synthetic construct
  misc_feature 1..49: note = Description of Artificial Sequence: Synthetic oligonucleotide
  source 1..49: mol_type = other DNA
gcagctcacagtgtgccacctggagcttcttaacagcgatgctgacccc

SEQ ID NO: 10983 - DNA, 79 bp, synthetic construct
  misc_feature 1..79: note = Description of Artificial Sequence: Synthetic oligonucleotide
  source 1..79: mol_type = other DNA
gcagctcacagtgtgccaccatggagttggggccctagaaggtggctacctggagcttcttaacagcgatgctgacccc

SEQ ID NO: 10984 - DNA, 75 bp, synthetic construct
  misc_feature 1..75: note = Description of Artificial Sequence: Synthetic oligonucleotide
  source 1..75: mol_type = other DNA
gcagctcacagtgtgccaccatggagttggggagaaggtggctacctggagcttcttaacagcgatgctgacccc

SEQ ID NO: 10985 - DNA, 78 bp, synthetic construct
  misc_feature 1..78: note = Description of Artificial Sequence: Synthetic oligonucleotide
  source 1..78: mol_type = other DNA
cagcaggctgttgtgtgacatggaaggtgatgaagaccagggaggcttatgccaatatcggtgaggaagcacctgagc

SEQ ID NO: 10986 - DNA, 79 bp, synthetic construct
  misc_feature 1..79: note = Description of Artificial Sequence: Synthetic oligonucleotide
  source 1..79: mol_type = other DNA
cagcaggctgttgtgtgacatggaaggtgatgaagaaccagggaggcttatgccaatatcggtgaggaagcacctgagc

SEQ ID NO: 10987 - DNA, 64 bp, synthetic construct
  misc_feature 1..64: note = Description of Artificial Sequence: Synthetic oligonucleotide
  source 1..64: mol_type = other DNA
cagcaggctgttgtgtgacatggaagggaggcttatgccaatatcggtgaggaagcacctgagc

SEQ ID NO: 10988 - DNA, 71 bp, synthetic construct
  misc_feature 1..71: note = Description of Artificial Sequence: Synthetic oligonucleotide
  source 1..71: mol_type = other DNA
cagcaggctgttgtgtgacatggaaggtgatgaagaggcttatgccaatatcggtgaggaagcacctgagc

SEQ ID NO: 10989 - DNA, 60 bp, synthetic construct
  misc_feature 1..60: note = Description of Artificial Sequence: Synthetic oligonucleotide
  source 1..60: mol_type = other DNA
cagcaggctgttgtgtgacatggaaggcttatgccaatatcggtgaggaagcacctgagc

SEQ ID NO: 10990 - DNA, 78 bp, synthetic construct
  misc_feature 1..78: note = Description of Artificial Sequence: Synthetic oligonucleotide
  source 1..78: mol_type = other DNA
cagcaggctgttgtgtgacatggaaggtgatgaagagcagggaggcttatgccaatatcggtgaggaagcacctgagc

SEQ ID NO: 10991 - DNA, 73 bp, synthetic construct
  misc_feature 1..73: note = Description of Artificial Sequence: Synthetic oligonucleotide
  source 1..73: mol_type = other DNA
cagcaggctgttgtgtgacatggaaggtgatgaagggaggcttatgccaatatcggtgaggaagcacctgagc

SEQ ID NO: 10992 - DNA, 59 bp, synthetic construct
  misc_feature 1..59: note = Description of Artificial Sequence: Synthetic oligonucleotide
  source 1..59: mol_type = other DNA
cagcaggctgttgtgtgacagggaggcttatgccaatatcggtgaggaagcacctgagc

SEQ ID NO: 10993 - DNA, 44 bp, synthetic construct
  misc_feature 1..44: note = Description of Artificial Sequence: Synthetic oligonucleotide
  source 1..44: mol_type = other DNA
cagcaggctgttgtgtgacatggaaggtgaggaagcacctgagc

SEQ ID NO: 10994 - DNA, 76 bp, synthetic construct
  misc_feature 1..76: note = Description of Artificial Sequence: Synthetic oligonucleotide
  source 1..76: mol_type = other DNA
cagcaggctgttgtgtgacatggaaggtgatgaaccagggaggcttatgccaatatcggtgaggaagcacctgagc

SEQ ID NO: 10995 - DNA, 79 bp, synthetic construct
  misc_feature 1..79: note = Description of Artificial Sequence: Synthetic oligonucleotide
  source 1..79: mol_type = other DNA
agcaggctgttgtgtgacatggaaggtgatgaagagccagggaggcttatgccaatatcggtgaggaagcacctgagcc

SEQ ID NO: 10996 - DNA, 81 bp, synthetic construct
  misc_feature 1..81: note = Description of Artificial Sequence: Synthetic oligonucleotide
  source 1..81: mol_type = other DNA
agcaggctgttgtgtgacatggaaggtgatgaagagaaccagggaggcttatgccaatatcggtgaggaagcacctgagcc

SEQ ID NO: 10997 - DNA, 44 bp, synthetic construct
  misc_feature 1..44: note = Description of Artificial Sequence: Synthetic oligonucleotide
  source 1..44: mol_type = other DNA
agcaggctgttgtgtgacatggaaggtgaggaagcacctgagcc

SEQ ID NO: 10998 - DNA, 60 bp, synthetic construct
  misc_feature 1..60: note = Description of Artificial Sequence: Synthetic oligonucleotide
  source 1..60: mol_type = other DNA
agcaggctgttgtgtgacatggaaggcttatgccaatatcggtgaggaagcacctgagcc

SEQ ID NO: 10999 - DNA, 59 bp, synthetic construct
  misc_feature 1..59: note = Description of Artificial Sequence: Synthetic oligonucleotide
  source 1..59: mol_type = other DNA
agcaggctgttgtgtgacatggaaggtgatgccaatatcggtgaggaagcacctgagcc

SEQ ID NO: 11000 - DNA, 71 bp, synthetic construct
  misc_feature 1..71: note = Description of Artificial Sequence: Synthetic oligonucleotide
  source 1..71: mol_type = other DNA
agcaggctgttgtgtgacatggaaggtgatgaagaggcttatgccaatatcggtgaggaagcacctgagcc

SEQ ID NO: 11001 - DNA, 64 bp, synthetic construct
  misc_feature 1..64: note = Description of Artificial Sequence: Synthetic oligonucleotide
  source 1..64: mol_type = other DNA
agcaggctgttgtgtgacatggaagggaggcttatgccaatatcggtgaggaagcacctgagcc

SEQ ID NO: 11002 - DNA, 78 bp, synthetic construct
  misc_feature 1..78: note = Description of Artificial Sequence: Synthetic oligonucleotide
  source 1..78: mol_type = other DNA
agcaggctgttgtgtgacatggaaggtgatgaagaccagggaggcttatgccaatatcggtgaggaagcacctgagcc

SEQ ID NO: 11003 - DNA, 73 bp, synthetic construct
  misc_feature 1..73: note = Description of Artificial Sequence: Synthetic oligonucleotide
  source 1..73: mol_type = other DNA
agcaggctgttgtgtgacatggaaggtgatgaagggaggcttatgccaatatcggtgaggaagcacctgagcc

SEQ ID NO: 11004 - DNA, 79 bp, synthetic construct
  misc_feature 1..79: note = Description of Artificial Sequence: Synthetic oligonucleotide
  source 1..79: mol_type = other DNA
agcaggctgttgtgtgacatggaaggtgatgaagagacagggaggcttatgccaatatcggtgaggaagcacctgagcc

SEQ ID NO: 11005 - DNA, 81 bp, synthetic construct; identical to SEQ ID NO: 10960
  misc_feature 1..81: note = Description of Artificial Sequence: Synthetic oligonucleotide
  source 1..81: mol_type = other DNA

SEQ ID NO: 11006 - DNA, 72 bp, synthetic construct; identical to SEQ ID NO: 10962
  misc_feature 1..72: note = Description of Artificial Sequence: Synthetic oligonucleotide
  source 1..72: mol_type = other DNA

SEQ ID NO: 11007 - DNA, 78 bp, synthetic construct; identical to SEQ ID NO: 10963
  misc_feature 1..78: note = Description of Artificial Sequence: Synthetic oligonucleotide
  source 1..78: mol_type = other DNA

SEQ ID NO: 11008 - DNA, 75 bp, synthetic construct
  misc_feature 1..75: note = Description of Artificial Sequence: Synthetic oligonucleotide
  source 1..75: mol_type = other DNA
tttttctcaaagtagagcacataggaccagatgatcggtgagagtatggagatgccagcagaagttgggcagaaa

SEQ ID NO: 11009 - DNA, 68 bp, synthetic construct; identical to SEQ ID NO: 10961
  misc_feature 1..68: note = Description of Artificial Sequence: Synthetic oligonucleotide
  source 1..68: mol_type = other DNA

SEQ ID NO: 11010 - DNA, 78 bp, synthetic construct
  misc_feature 1..78: note = Description of Artificial Sequence: Synthetic oligonucleotide
  source 1..78: mol_type = other DNA
tttttctcaaagtagagcacataggaccagatgaagatcggtgagagtatggagatgccagcagaagttgggcagaaa

SEQ ID NO: 11011 - DNA, 79 bp, synthetic construct
  misc_feature 1..79: note = Description of Artificial Sequence: Synthetic oligonucleotide
  source 1..79: mol_type = other DNA
tttttctcaaagtagagcacataggaccagatgaatgatcggtgagagtatggagatgccagcagaagttgggcagaaa

SEQ ID NO: 11012 - DNA, 77 bp, synthetic construct; identical to SEQ ID NO: 10964
  misc_feature 1..77: note = Description of Artificial Sequence: Synthetic oligonucleotide
  source 1..77: mol_type = other DNA

SEQ ID NO: 11013 - DNA, 76 bp, synthetic construct
  misc_feature 1..76: note = Description of Artificial Sequence: Synthetic oligonucleotide
  source 1..76: mol_type = other DNA
tttttctcaaagtagagcacataggaccagattgatcggtgagagtatggagatgccagcagaagttgggcagaaa

SEQ ID NO: 11014 - DNA, 77 bp, synthetic construct
  misc_feature 1..77: note = Description of Artificial Sequence: Synthetic oligonucleotide
  source 1..77: mol_type = other DNA
tttttctcaaagtagagcacataggaccagatgagatcggtgagagtatggagatgccagcagaagttgggcagaaa

SEQ ID NO: 11015 - DNA, 81 bp, synthetic construct
  misc_feature 1..81: note = Description of Artificial Sequence: Synthetic oligonucleotide
  source 1..81: mol_type = other DNA
gtcgcgctggcgggcattcctgaagctgacagcattcgggccgagattgtctcgctccgtggccttagctgtgctcgcgct

SEQ ID NO: 11016 - DNA, 65 bp, synthetic construct
  misc_feature 1..65: note = Description of Artificial Sequence: Synthetic oligonucleotide
  source 1..65: mol_type = other DNA
gtcgcgctggcgggcattcctgaagctgacagcattcgctccgtggccttagctgtgctcgcgct

SEQ ID NO: 11017 - DNA, 65 bp, synthetic construct
  misc_feature 1..65: note = Description of Artificial Sequence: Synthetic oligonucleotide
  source 1..65: mol_type = other DNA
gtcgcgctggcgggcattcctgaagctgacagcattcgggccgtggccttagctgtgctcgcgct

SEQ ID NO: 11018 - DNA, 59 bp, synthetic construct
  misc_feature 1..59: note = Description of Artificial Sequence: Synthetic oligonucleotide
  source 1..59: mol_type = other DNA
gtcgcgctggcgggcattcctgaagctgacagcattcgggccttagctgtgctcgcgct

SEQ ID NO: 11019 - DNA, 79 bp, synthetic construct
  misc_feature 1..79: note = Description of Artificial Sequence: Synthetic oligonucleotide
  source 1..79: mol_type = other DNA
gtcgcgctggcgggcattcctgaagctgacagcattcgggccgagagtctcgctccgtggccttagctgtgctcgcgct

SEQ ID NO: 11020 - DNA, 78 bp, synthetic construct
  misc_feature 1..78: note = Description of Artificial Sequence: Synthetic oligonucleotide
  source 1..78: mol_type = other DNA
gtcgcgctggcgggcattcctgaagctgacagcattcgggccgagatctcgctccgtggccttagctgtgctcgcgct

SEQ ID NO: 11021 - DNA, 59 bp, synthetic construct
  misc_feature 1..59: note = Description of Artificial Sequence: Synthetic oligonucleotide
  source 1..59: mol_type = other DNA
gtcgcgctggcgggcattcctgaagctgacagctccgtggccttagctgtgctcgcgct

SEQ ID NO: 11022 - DNA, 60 bp, synthetic construct
  misc_feature 1..60: note = Description of Artificial Sequence: Synthetic oligonucleotide
  source 1..60: mol_type = other DNA
gtcgcgctggcgggcattcctgaagctgacagcattcgtggccttagctgtgctcgcgct

SEQ ID NO: 11023 - DNA, 60 bp, synthetic construct
  misc_feature 1..60: note = Description of Artificial Sequence: Synthetic oligonucleotide
  source 1..60: mol_type = other DNA
gtcgcgctggcgggcattcctgaagctgacagcatccgtggccttagctgtgctcgcgct

SEQ ID NO: 11024 - DNA, 81 bp, synthetic construct
  misc_feature 1..81: note = Description of Artificial Sequence: Synthetic oligonucleotide
  source 1..81: mol_type = other DNA
gtcgcgctggcgggcattcctgaagctgacagcattcgggccgagaatgtctcgctccgtggccttagctgtgctcgcgct

SEQ ID NO: 11025 - DNA, 65 bp, synthetic construct; identical to SEQ ID NO: 11016
  misc_feature 1..65: note = Description of Artificial Sequence: Synthetic oligonucleotide
  source 1..65: mol_type = other DNA

SEQ ID NO: 11026 - DNA, 81 bp, synthetic construct; identical to SEQ ID NO: 11015
  misc_feature 1..81: note = Description of Artificial Sequence: Synthetic oligonucleotide
  source 1..81: mol_type = other DNA

SEQ ID NO: 11027 - DNA, 65 bp, synthetic construct; identical to SEQ ID NO: 11017
  misc_feature 1..65: note = Description of Artificial Sequence: Synthetic oligonucleotide
  source 1..65: mol_type = other DNA

SEQ ID NO: 11028 - DNA, 59 bp, synthetic construct; identical to SEQ ID NO: 11018
  misc_feature 1..59: note = Description of Artificial Sequence: Synthetic oligonucleotide
  source 1..59: mol_type = other DNA

SEQ ID NO: 11029 - DNA, 79 bp, synthetic construct; identical to SEQ ID NO: 11019
  misc_feature 1..79: note = Description of Artificial Sequence: Synthetic oligonucleotide
  source 1..79: mol_type = other DNA

SEQ ID NO: 11030 - DNA, 59 bp, synthetic construct; identical to SEQ ID NO: 11021
  misc_feature 1..59: note = Description of Artificial Sequence: Synthetic oligonucleotide
  source 1..59: mol_type = other DNA

SEQ ID NO: 11031 - DNA, 78 bp, synthetic construct; identical to SEQ ID NO: 11020
  misc_feature 1..78: note = Description of Artificial Sequence: Synthetic oligonucleotide
  source 1..78: mol_type = other DNA

SEQ ID NO: 11032 - DNA, 81 bp, synthetic construct; identical to SEQ ID NO: 11024
  misc_feature 1..81: note = Description of Artificial Sequence: Synthetic oligonucleotide
  source 1..81: mol_type = other DNA

SEQ ID NO: 11033 - DNA, 60 bp, synthetic construct; identical to SEQ ID NO: 11023
  misc_feature 1..60: note = Description of Artificial Sequence: Synthetic oligonucleotide
  source 1..60: mol_type = other DNA

SEQ ID NO: 11034 - DNA, 60 bp, synthetic construct; identical to SEQ ID NO: 11022
  misc_feature 1..60: note = Description of Artificial Sequence: Synthetic oligonucleotide
  source 1..60: mol_type = other DNA

SEQ ID NO: 11035 - DNA, 81 bp, synthetic construct; identical to SEQ ID NO: 11015
  misc_feature 1..81: note = Description of Artificial Sequence: Synthetic oligonucleotide
  source 1..81: mol_type = other DNA

SEQ ID NO: 11036 - DNA, 65 bp, synthetic construct; identical to SEQ ID NO: 11016
  misc_feature 1..65: note = Description of Artificial Sequence: Synthetic oligonucleotide
  source 1..65: mol_type = other DNA

SEQ ID NO: 11037 - DNA, 65 bp, synthetic construct; identical to SEQ ID NO: 11017
  misc_feature 1..65: note = Description of Artificial Sequence: Synthetic oligonucleotide
  source 1..65: mol_type = other DNA

SEQ ID NO: 11038 - DNA, 59 bp, synthetic construct; identical to SEQ ID NO: 11018
  misc_feature 1..59: note = Description of Artificial Sequence: Synthetic oligonucleotide
  source 1..59: mol_type = other DNA

SEQ ID NO: 11039 - DNA, 79 bp, synthetic construct; identical to SEQ ID NO: 11019
  misc_feature 1..79: note = Description of Artificial Sequence: Synthetic oligonucleotide
  source 1..79: mol_type = other DNA

SEQ ID NO: 11040 - DNA, 78 bp, synthetic construct; identical to SEQ ID NO: 11020
  misc_feature 1..78: note = Description of Artificial Sequence: Synthetic oligonucleotide
  source 1..78: mol_type = other DNA

SEQ ID NO: 11041 - DNA, 59 bp, synthetic construct; identical to SEQ ID NO: 11021
  misc_feature 1..59: note = Description of Artificial Sequence: Synthetic oligonucleotide
  source 1..59: mol_type = other DNA

SEQ ID NO: 11042 - DNA, 60 bp, synthetic construct; identical to SEQ ID NO: 11022
  misc_feature 1..60: note = Description of Artificial Sequence: Synthetic oligonucleotide
  source 1..60: mol_type = other DNA

SEQ ID NO: 11043 - DNA, 60 bp, synthetic construct; identical to SEQ ID NO: 11023
  misc_feature 1..60: note = Description of Artificial Sequence: Synthetic oligonucleotide
  source 1..60: mol_type = other DNA

SEQ ID NO: 11044 - DNA, 67 bp, synthetic construct
  misc_feature 1..67: note = Description of Artificial Sequence: Synthetic oligonucleotide
  source 1..67: mol_type = other DNA
gtcgcgctggcgggcattcctgaagctgacagcattcgggctccgtggccttagctgtgctcgcgct

SEQ ID NO: 11045 - DNA, 65 bp, synthetic construct; identical to SEQ ID NO: 11016
  misc_feature 1..65: note = Description of Artificial Sequence: Synthetic oligonucleotide
  source 1..65: mol_type = other DNA

SEQ ID NO: 11046 - DNA, 81 bp, synthetic construct; identical to SEQ ID NO: 11015
  misc_feature 1..81: note = Description of Artificial Sequence: Synthetic oligonucleotide
  source 1..81: mol_type = other DNA

SEQ ID NO: 11047 - DNA, 65 bp, synthetic construct; identical to SEQ ID NO: 11017
  misc_feature 1..65: note = Description of Artificial Sequence: Synthetic oligonucleotide
  source 1..65: mol_type = other DNA

SEQ ID NO: 11048 - DNA, 59 bp, synthetic construct; identical to SEQ ID NO: 11018
  misc_feature 1..59: note = Description of Artificial Sequence: Synthetic oligonucleotide
  source 1..59: mol_type = other DNA

SEQ ID NO: 11049 - DNA, 79 bp, synthetic construct; identical to SEQ ID NO: 11019
  misc_feature 1..79: note = Description of Artificial Sequence: Synthetic oligonucleotide
  source 1..79: mol_type = other DNA

SEQ ID NO: 11050 - DNA, 59 bp, synthetic construct; identical to SEQ ID NO: 11021
  misc_feature 1..59: note = Description of Artificial Sequence: Synthetic oligonucleotide
  source 1..59: mol_type = other DNA

SEQ ID NO: 11051 - DNA, 78 bp, synthetic construct; identical to SEQ ID NO: 11020
  misc_feature 1..78: note = Description of Artificial Sequence: Synthetic oligonucleotide
  source 1..78: mol_type = other DNA

SEQ ID NO: 11052 - DNA, 81 bp, synthetic construct; identical to SEQ ID NO: 11024
  misc_feature 1..81: note = Description of Artificial Sequence: Synthetic oligonucleotide
  source 1..81: mol_type = other DNA

SEQ ID NO: 11053 - DNA, 60 bp, synthetic construct; identical to SEQ ID NO: 11022
  misc_feature 1..60: note = Description of Artificial Sequence: Synthetic oligonucleotide
  source 1..60: mol_type = other DNA

SEQ ID NO: 11054 - DNA, 67 bp, synthetic construct; identical to SEQ ID NO: 11044
  misc_feature 1..67: note = Description of Artificial Sequence: Synthetic oligonucleotide
  source 1..67: mol_type = other DNA

SEQ ID NO: 11055 - DNA, 81 bp, synthetic construct
  misc_feature 1..81: note = Description of Artificial Sequence: Synthetic oligonucleotide
  source 1..81: mol_type = other DNA
tgatcctcttgtcccacagatatccagaaccctgaccctgccgtgtaaccagctgagagactctaaatccagtgacaagtc

SEQ ID NO: 11056 - DNA, 81 bp, synthetic construct
  misc_feature 1..81: note = Description of Artificial Sequence: Synthetic oligonucleotide
  source 1..81: mol_type = other DNA
tgatcctcttgtcccacagatatccagaaccctgaccctgccgtgttaccagctgagagactctaaatccagtgacaagtc

SEQ ID NO: 11057 - DNA, 69 bp, synthetic construct
  misc_feature 1..69: note = Description of Artificial Sequence: Synthetic oligonucleotide
  source 1..69: mol_type = other DNA
tgatcctcttgtcccacagatatccagaaccctgacccagctgagagactctaaatccagtgacaagtc

SEQ ID NO: 11058 - DNA, 81 bp, synthetic construct
  misc_feature 1..81: note = Description of Artificial Sequence: Synthetic oligonucleotide
  source 1..81: mol_type = other DNA
tgatcctcttgtcccacagatatccagaaccctgaccctgccgtgtgaccagctgagagactctaaatccagtgacaagtc

SEQ ID NO: 11059 - DNA, 73 bp, synthetic construct
  misc_feature 1..73: note = Description of Artificial Sequence: Synthetic oligonucleotide
  source 1..73: mol_type = other DNA
tgatcctcttgtcccacagatatccagaaccctgaccctgccagctgagagactctaaatccagtgacaagtc

SEQ ID NO: 11060 - DNA, 69 bp, synthetic construct
  misc_feature 1..69: note = Description of Artificial Sequence: Synthetic oligonucleotide
  source 1..69: mol_type = other DNA
tgatcctcttgtcccacagatatccagaaccctgaccctgctgagagactctaaatccagtgacaagtc

SEQ ID NO: 11061 - DNA, 56 bp, synthetic construct
  misc_feature 1..56: note = Description of Artificial Sequence: Synthetic oligonucleotide
  source 1..56: mol_type = other DNA
tgatcctcttgtcccacagatatccagaaccctgactctaaatccagtgacaagtc

SEQ ID NO: 11062 - DNA, 68 bp, synthetic construct
  misc_feature 1..68: note = Description of Artificial Sequence: Synthetic oligonucleotide
  source 1..68: mol_type = other DNA
tgatcctcttgtcccacagatatccagaaccctgaccagctgagagactctaaatccagtgacaagtc

SEQ ID NO: 11063 - DNA, 66 bp, synthetic construct
  misc_feature 1..66: note = Description of Artificial Sequence: Synthetic oligonucleotide
  source 1..66: mol_type = other DNA
tgatcctcttgtcccacagatatccagaaccctgaccctgagagactctaaatccagtgacaagtc

SEQ ID NO: 11064 - DNA, 78 bp, synthetic construct
  misc_feature 1..78: note = Description of Artificial Sequence: Synthetic oligonucleotide
  source 1..78: mol_type = other DNA
tgatcctcttgtcccacagatatccagaaccctgaccctgccgtgtcagctgagagactctaaatccagtgacaagtc

SEQ ID NO: 11065 - DNA, 81 bp, synthetic construct; identical to SEQ ID NO: 11055
  misc_feature 1..81: note = Description of Artificial Sequence: Synthetic oligonucleotide
  source 1..81: mol_type = other DNA

SEQ ID NO: 11066 - DNA, 81 bp, synthetic construct; identical to SEQ ID NO: 11056
  misc_feature 1..81: note = Description of Artificial Sequence: Synthetic oligonucleotide
  source 1..81: mol_type = other DNA

SEQ ID NO: 11067 - DNA, 69 bp, synthetic construct; identical to SEQ ID NO: 11057
  misc_feature 1..69: note = Description of Artificial Sequence: Synthetic oligonucleotide
  source 1..69: mol_type = other DNA

SEQ ID NO: 11068 - DNA, 81 bp, synthetic construct; identical to SEQ ID NO: 11058
  misc_feature 1..81: note = Description of Artificial Sequence: Synthetic oligonucleotide
  source 1..81: mol_type = other DNA

SEQ ID NO: 11069 - DNA, 73 bp, synthetic construct; identical to SEQ ID NO: 11059
  misc_feature 1..73: note = Description of Artificial Sequence: Synthetic oligonucleotide
  source 1..73: mol_type = other DNA

SEQ ID NO: 11070 - DNA, 69 bp, synthetic construct; identical to SEQ ID NO: 11060
  misc_feature 1..69: note = Description of Artificial Sequence: Synthetic oligonucleotide
  source 1..69: mol_type = other DNA

SEQ ID NO: 11071 - DNA, 77 bp, synthetic construct
  misc_feature 1..77: note = Description of Artificial Sequence: Synthetic oligonucleotide
  source 1..77: mol_type = other DNA
tgatcctcttgtcccacagatatccagaaccctgaccctgccgtgtagctgagagactctaaatccagtgacaagtc

SEQ ID NO: 11072 - DNA, 68 bp, synthetic construct; identical to SEQ ID NO: 11062
  misc_feature 1..68: note = Description of Artificial Sequence: Synthetic oligonucleotide
  source 1..68: mol_type = other DNA

SEQ ID NO: 11073 - DNA, 66 bp, synthetic construct; identical to SEQ ID NO: 11063
  misc_feature 1..66: note = Description of Artificial Sequence: Synthetic oligonucleotide
  source 1..66: mol_type = other DNA

SEQ ID NO: 11074 - DNA, 82 bp, synthetic construct
  misc_feature 1..82: note = Description of Artificial Sequence: Synthetic oligonucleotide
  source 1..82: mol_type = other DNA
tgatcctcttgtcccacagatatccagaaccctgaccctgccgtgtataccagctgagagactctaaatccagtgacaagtc

SEQ ID NO: 11075 - DNA, 81 bp, synthetic construct; identical to SEQ ID NO: 11055
  misc_feature 1..81: note = Description of Artificial Sequence: Synthetic oligonucleotide
  source 1..81: mol_type = other DNA

SEQ ID NO: 11076 - DNA, 81 bp, synthetic construct; identical to SEQ ID NO: 11056
  misc_feature 1..81: note = Description of Artificial Sequence: Synthetic oligonucleotide
  source 1..81: mol_type = other DNA

SEQ ID NO: 11077 - DNA, 69 bp, synthetic construct; identical to SEQ ID NO: 11057
  misc_feature 1..69: note = Description of Artificial Sequence: Synthetic oligonucleotide
  source 1..69: mol_type = other DNA

SEQ ID NO: 11078 - DNA, 73 bp, synthetic construct; identical to SEQ ID NO: 11059
  misc_feature 1..73: note = Description of Artificial Sequence: Synthetic oligonucleotide
  source 1..73: mol_type = other DNA

SEQ ID NO: 11079 - DNA, 81 bp, synthetic construct; identical to SEQ ID NO: 11058
  misc_feature 1..81: note = Description of Artificial Sequence: Synthetic oligonucleotide
  source 1..81: mol_type = other DNA

SEQ ID NO: 11080 - DNA, 69 bp, synthetic construct; identical to SEQ ID NO: 11060
  misc_feature 1..69: note = Description of Artificial Sequence: Synthetic oligonucleotide
  source 1..69: mol_type = other DNA

SEQ ID NO: 11081 - DNA, 68 bp, synthetic construct; identical to SEQ ID NO: 11062
  misc_feature 1..68: note = Description of Artificial Sequence: Synthetic oligonucleotide
  source 1..68: mol_type = other DNA

SEQ ID NO: 11082 - DNA, 78 bp, synthetic construct; identical to SEQ ID NO: 11064
  misc_feature 1..78: note = Description of Artificial Sequence: Synthetic oligonucleotide
  source 1..78: mol_type = other DNA

SEQ ID NO: 11083 - DNA, 82 bp, synthetic construct; identical to SEQ ID NO: 11074
  misc_feature 1..82: note = Description of Artificial Sequence: Synthetic oligonucleotide
  source 1..82: mol_type = other DNA

SEQ ID NO: 11084 - DNA, 79 bp, synthetic construct
  misc_feature 1..79: note = Description of Artificial Sequence: Synthetic oligonucleotide
  source 1..79: mol_type = other DNA
tgatcctcttgtcccacagatatccagaaccctgaccctgccgtgaccagctgagagactctaaatccagtgacaagtc

SEQ ID NO: 11085 - DNA, 81 bp, synthetic construct; identical to SEQ ID NO: 11055
  misc_feature 1..81: note = Description of Artificial Sequence: Synthetic oligonucleotide
  source 1..81: mol_type = other DNA

SEQ ID NO: 11086 - DNA, 81 bp, synthetic construct; identical to SEQ ID NO: 11056
  misc_feature 1..81: note = Description of Artificial Sequence: Synthetic oligonucleotide
  source 1..81: mol_type = other DNA

SEQ ID NO: 11087 - DNA, 69 bp, synthetic construct; identical to SEQ ID NO: 11057
  misc_feature 1..69: note = Description of Artificial Sequence: Synthetic oligonucleotide
  source 1..69: mol_type = other DNA

SEQ ID NO: 11088 - DNA, 73 bp, synthetic construct; identical to SEQ ID NO: 11059
  misc_feature 1..73: note = Description of Artificial Sequence: Synthetic oligonucleotide
  source 1..73: mol_type = other DNA

SEQ ID NO: 11089 - DNA, 69 bp, synthetic construct; identical to SEQ ID NO: 11060
  misc_feature 1..69: note = Description of Artificial Sequence: Synthetic oligonucleotide
  source 1..69: mol_type = other DNA

SEQ ID NO: 11090 - DNA, 81 bp, synthetic construct; identical to SEQ ID NO: 11058
  misc_feature 1..81: note = Description of Artificial Sequence: Synthetic oligonucleotide
  source 1..81: mol_type = other DNA

SEQ ID NO: 11091 - DNA, 79 bp, synthetic construct; identical to SEQ ID NO: 11084
  misc_feature 1..79: note = Description of Artificial Sequence: Synthetic oligonucleotide
  source 1..79: mol_type = other DNA

SEQ ID NO: 11092 - DNA, 66 bp, synthetic construct; identical to SEQ ID NO: 11063
  misc_feature 1..66: note = Description of Artificial Sequence: Synthetic oligonucleotide
  source 1..66: mol_type = other DNA

SEQ ID NO: 11093 - DNA, 56 bp, synthetic construct; identical to SEQ ID NO: 11061
  misc_feature 1..56: note = Description of Artificial Sequence: Synthetic oligonucleotide
  source 1..56: mol_type = other DNA

SEQ ID NO: 11094 - DNA, 68 bp, synthetic construct; identical to SEQ ID NO: 11062
  misc_feature 1..68: note = Description of Artificial Sequence: Synthetic oligonucleotide
  source 1..68: mol_type = other DNA

SEQ ID NO: 11095 - DNA, 81 bp, synthetic construct; identical to SEQ ID NO: 10925
  misc_feature 1..81: note = Description of Artificial Sequence: Synthetic oligonucleotide
  source 1..81: mol_type = other DNA

SEQ ID NO: 11096 - DNA, 68 bp, synthetic construct; identical to SEQ ID NO: 10926
  misc_feature 1..68: note = Description of Artificial Sequence: Synthetic oligonucleotide
  source 1..68: mol_type = other DNA

SEQ ID NO: 11097 - DNA, 79 bp, synthetic construct; identical to SEQ ID NO: 10928
  misc_feature 1..79: note = Description of Artificial Sequence: Synthetic oligonucleotide
  source 1..79: mol_type = other DNA

SEQ ID NO: 11098 - DNA, 79 bp, synthetic construct; identical to SEQ ID NO: 10927
  misc_feature 1..79: note = Description of Artificial Sequence: Synthetic oligonucleotide
  source 1..79: mol_type = other DNA

SEQ ID NO: 11099 - DNA, 66 bp, synthetic construct
  misc_feature 1..66: note = Description of Artificial Sequence: Synthetic oligonucleotide
  source 1..66: mol_type = other DNA
aactgcgaccagttcagcaggctgttgtgatgaagagaccagggaggcttatgccaatatcggtga

SEQ ID NO: 11100 - DNA, 78 bp, synthetic construct
  misc_feature 1..78: note = Description of Artificial Sequence: Synthetic oligonucleotide
  source 1..78: mol_type = other DNA
aactgcgaccagttcagcaggctgttgtgtgacggaaggtgatgaagagaccagggaggcttatgccaatatcggtga

SEQ ID NO: 11101 - DNA, 65 bp, synthetic construct
  misc_feature 1..65: note = Description of Artificial Sequence: Synthetic oligonucleotide
  source 1..65: mol_type = other DNA
aactgcgaccagttcagcaggctgttgtgtgaagagaccagggaggcttatgccaatatcggtga

SEQ ID NO: 11102 - DNA, 78 bp, synthetic construct; identical to SEQ ID NO: 10929
  misc_feature 1..78: note = Description of Artificial Sequence: Synthetic oligonucleotide
  source 1..78: mol_type = other DNA

SEQ ID NO: 11103 - DNA, 75 bp, synthetic construct
  misc_feature 1..75: note = Description of Artificial Sequence: Synthetic oligonucleotide
  source 1..75: mol_type = other DNA
aactgcgaccagttcagcaggctgttgtgtggaaggtgatgaagagaccagggaggcttatgccaatatcggtga

SEQ ID NO: 11104 - DNA, 60 bp, synthetic construct
  misc_feature 1..60: note = Description of Artificial Sequence: Synthetic oligonucleotide
  source 1..60: mol_type = other DNA
aactgcgaccagttcagcaggtgatgaagagaccagggaggcttatgccaatatcggtga

SEQ ID NO: 11105 - DNA, 81 bp, synthetic construct; identical to SEQ ID NO: 10925
  misc_feature 1..81: note = Description of Artificial Sequence: Synthetic oligonucleotide
  source 1..81: mol_type = other DNA

SEQ ID NO: 11106 - DNA, 68 bp, synthetic construct; identical to SEQ ID NO: 10926
  misc_feature 1..68: note = Description of Artificial Sequence: Synthetic oligonucleotide
  source 1..68: mol_type = other DNA

SEQ ID NO: 11107 - DNA, 79 bp, synthetic construct; identical to SEQ ID NO: 10928
  misc_feature 1..79: note = Description of Artificial Sequence: Synthetic oligonucleotide
  source 1..79: mol_type = other DNA

SEQ ID NO: 11108 - DNA, 79 bp, synthetic construct; identical to SEQ ID NO: 10927
  misc_feature 1..79: note = Description of Artificial Sequence: Synthetic oligonucleotide
  source 1..79: mol_type = other DNA

SEQ ID NO: 11109 - DNA, 66 bp, synthetic construct; identical to SEQ ID NO: 11099
  misc_feature 1..66: note = Description of Artificial Sequence: Synthetic oligonucleotide
  source 1..66: mol_type = other DNA

SEQ ID NO: 11110 - DNA, 65 bp, synthetic construct; identical to SEQ ID NO: 11101
  misc_feature 1..65: note = Description of Artificial Sequence: Synthetic oligonucleotide
  source 1..65: mol_type = other DNA

SEQ ID NO: 11111 - DNA, 78 bp, synthetic construct; identical to SEQ ID NO: 11100
  misc_feature 1..78: note = Description of Artificial Sequence: Synthetic oligonucleotide
  source 1..78: mol_type = other DNA

SEQ ID NO: 11112 - DNA, 36 bp, synthetic construct
  misc_feature 1..36: note = Description of Artificial Sequence: Synthetic oligonucleotide
  source 1..36: mol_type = other DNA
aactgcgaccagggaggcttatgccaatatcggtga

SEQ ID NO: 11113 - DNA, 75 bp, synthetic construct; identical to SEQ ID NO: 11103
  misc_feature 1..75: note = Description of Artificial Sequence: Synthetic oligonucleotide
  source 1..75: mol_type = other DNA

SEQ ID NO: 11114 - DNA, 78 bp, synthetic construct; identical to SEQ ID NO: 10929
  misc_feature 1..78: note = Description of Artificial Sequence: Synthetic oligonucleotide
  source 1..78: mol_type = other DNA

SEQ ID NO: 11115 - DNA, 81 bp, synthetic construct; identical to SEQ ID NO: 10925
  misc_feature 1..81: note = Description of Artificial Sequence: Synthetic oligonucleotide
  source 1..81: mol_type = other DNA

SEQ ID NO: 11116 - DNA, 68 bp, synthetic construct; identical to SEQ ID NO: 10926
  misc_feature 1..68: note = Description of Artificial Sequence: Synthetic oligonucleotide
  source 1..68: mol_type = other DNA

SEQ ID NO: 11117 - DNA, 79 bp, synthetic construct; identical to SEQ ID NO: 10928
  misc_feature 1..79: note = Description of Artificial Sequence: Synthetic oligonucleotide
  source 1..79: mol_type = other DNA

SEQ ID NO: 11118 - DNA, 79 bp, synthetic construct; identical to SEQ ID NO: 10927
  misc_feature 1..79: note = Description of Artificial Sequence: Synthetic oligonucleotide
  source 1..79: mol_type = other DNA

SEQ ID NO: 11119 - DNA, 66 bp, synthetic construct; identical to SEQ ID NO: 11099
  misc_feature 1..66: note = Description of Artificial Sequence: Synthetic oligonucleotide
  source 1..66: mol_type = other DNA

SEQ ID NO: 11120 - DNA, 78 bp, synthetic construct; identical to SEQ ID NO: 11100
  misc_feature 1..78: note = Description of Artificial Sequence: Synthetic oligonucleotide
  source 1..78: mol_type = other DNA

SEQ ID NO: 11121 - DNA, 65 bp, synthetic construct; identical to SEQ ID NO: 11101
  misc_feature 1..65: note = Description of Artificial Sequence: Synthetic oligonucleotide
  source 1..65: mol_type = other DNA

SEQ ID NO: 11122 - DNA, 78 bp, synthetic construct; identical to SEQ ID NO: 10929
  misc_feature 1..78: note = Description of Artificial Sequence: Synthetic oligonucleotide
  source 1..78: mol_type = other DNA

SEQ ID NO: 11123 - DNA, 44 bp, synthetic construct
  misc_feature 1..44: note = Description of Artificial Sequence: Synthetic oligonucleotide
  source 1..44: mol_type = other DNA
aactgcgaccagttcagcagggaggcttatgccaatatcggtga

SEQ ID NO: 11124 - DNA, 36 bp, synthetic construct; identical to SEQ ID NO: 11112
  misc_feature 1..36: note = Description of Artificial Sequence: Synthetic oligonucleotide
  source 1..36: mol_type = other DNA

SEQ ID NO: 11125 - DNA, 81 bp, synthetic construct; identical to SEQ ID NO: 10925
  misc_feature 1..81: note = Description of Artificial Sequence: Synthetic oligonucleotide
  source 1..81: mol_type = other DNA

SEQ ID NO: 11126 - DNA, 68 bp, synthetic construct; identical to SEQ ID NO: 10926
  misc_feature 1..68: note = Description of Artificial Sequence: Synthetic oligonucleotide
  source 1..68: mol_type = other DNA

SEQ ID NO: 11127 - DNA, 79 bp, synthetic construct; identical to SEQ ID NO: 10928
  misc_feature 1..79: note = Description of Artificial Sequence: Synthetic oligonucleotide
  source 1..79: mol_type = other DNA

SEQ ID NO: 11128 - DNA, 79 bp, synthetic construct; identical to SEQ ID NO: 10927
  misc_feature 1..79: note = Description of Artificial Sequence: Synthetic oligonucleotide
  source 1..79: mol_type = other DNA

SEQ ID NO: 11129 - DNA, 78 bp, synthetic construct; identical to SEQ ID NO: 11100
  misc_feature 1..78: note = Description of Artificial Sequence: Synthetic oligonucleotide
  source 1..78: mol_type = other DNA

SEQ ID NO: 11130 - DNA, 66 bp, synthetic construct; identical to SEQ ID NO: 11099
  misc_feature 1..66: note = Description of Artificial Sequence: Synthetic oligonucleotide
  source 1..66: mol_type = other DNA

SEQ ID NO: 11131 - DNA, 78 bp, synthetic construct; identical to SEQ ID NO: 10929
  misc_feature 1..78: note = Description of Artificial Sequence: Synthetic oligonucleotide
  source 1..78: mol_type = other DNA

SEQ ID NO: 11132 - DNA, 76 bp, synthetic construct
  misc_feature 1..76: note = Description of Artificial Sequence: Synthetic oligonucleotide
  source 1..76: mol_type = other DNA
aactgcgaccagttcagcaggctgttgtgtgggaaggtgatgaagagaccagggaggcttatgccaatatcggtga

SEQ ID NO: 11133 - DNA, 65 bp, synthetic construct; identical to SEQ ID NO: 11101
  misc_feature 1..65: note = Description of Artificial Sequence: Synthetic oligonucleotide
  source 1..65: mol_type = other DNA

SEQ ID NO: 11134 - DNA, 74 bp, synthetic construct
  misc_feature 1..74: note = Description of Artificial Sequence: Synthetic oligonucleotide
  source 1..74: mol_type = other DNA
aactgcgaccagttcagcaggctgttgtgtgaaggtgatgaagagaccagggaggcttatgccaatatcggtga

SEQ ID NO: 11135 - DNA, 61 bp, synthetic construct
  misc_feature 1..61: note = Description of Artificial Sequence: Synthetic oligonucleotide
  source 1..61: mol_type = other DNA
cccctccccgctgggcccccgacttcaccggtgtagtgcaccacgcaggtctggccgcgct

SEQ ID NO: 11136 - DNA, 59 bp, synthetic construct
  misc_feature 1..59: note = Description of Artificial Sequence: Synthetic oligonucleotide
  source 1..59: mol_type = other DNA
cccctccccgctgggcccccgatcaccggtgtagtgcaccacgcaggtctggccgcgct

SEQ ID NO: 11137 - DNA, 58 bp, synthetic construct
  misc_feature 1..58: note = Description of Artificial Sequence: Synthetic oligonucleotide
  source 1..58: mol_type = other DNA
cccctccccgctgggcccccgacaccggtgtagtgcaccacgcaggtctggccgcgct

SEQ ID NO: 11138 - DNA, 58 bp, synthetic construct
  misc_feature 1..58: note = Description of Artificial Sequence: Synthetic oligonucleotide
  source 1..58: mol_type = other DNA
cccctccccgctgggcccccgtcaccggtgtagtgcaccacgcaggtctggccgcgct

SEQ ID NO: 11139 - DNA, 41 bp, synthetic construct
  misc_feature 1..41: note = Description of Artificial Sequence: Synthetic oligonucleotide
  source 1..41: mol_type = other DNA
cccctccccggtgtagtgcaccacgcaggtctggccgcgct

SEQ ID NO: 11140 - DNA, 61 bp, synthetic construct
  misc_feature 1..61: note = Description of Artificial Sequence: Synthetic oligonucleotide
  source 1..61: mol_type = other DNA
ctgggcccccgactcaccggtgtagtgcaccacgcaaggtctggccgcgcttggggaaggt

SEQ ID NO: 11141 - DNA, 57 bp, synthetic construct
  misc_feature 1..57: note = Description of Artificial Sequence: Synthetic oligonucleotide
  source 1..57: mol_type = other DNA
ctgggcccccgactcaccggtgtagtgcaccacgcactggccgcgcttggggaaggt

SEQ ID NO: 11142 - DNA, 56 bp, synthetic construct
  misc_feature 1..56: note = Description of Artificial Sequence: Synthetic oligonucleotide
  source 1..56: mol_type = other DNA
ctgggcccccgactcaccggtgtagtgcaccacgcatggccgcgcttggggaaggt

SEQ ID NO: 11143 - DNA, 58 bp, synthetic construct
  misc_feature 1..58: note = Description of Artificial Sequence: Synthetic oligonucleotide
  source 1..58: mol_type = other DNA
ctgggcccccgactcaccggtgtagtgcaccacgcatctggccgcgcttggggaaggt

SEQ ID NO: 11144 - DNA, 46 bp, synthetic construct
  misc_feature 1..46: note = Description of Artificial Sequence: Synthetic oligonucleotide
  source 1..46: mol_type = other DNA
ctgggcccccgactcaccggtgtagtgcaccacgcttggggaaggt

SEQ ID NO: 11145 - DNA, 59 bp, synthetic construct
  misc_feature 1..59: note = Description of Artificial Sequence: Synthetic oligonucleotide
  source 1..59: mol_type = other DNA
caggtctggccgcgcttggggaaggtgcgccctgagagacagagacgggcatgctgagc

SEQ ID NO: 11146 - DNA, 61 bp, synthetic construct
  misc_feature 1..61: note = Description of Artificial Sequence: Synthetic oligonucleotide
  source 1..61: mol_type = other DNA
caggtctggccgcgcttggggaaggtgcgccctgagggagacagagacgggcatgctgagc

SEQ ID NO: 11147 - DNA, 57 bp, synthetic construct
  misc_feature 1..57: note = Description of Artificial Sequence: Synthetic oligonucleotide
  source 1..57: mol_type = other DNA
caggtctggccgcgcttggggaaggtgcgccctgagacagagacgggcatgctgagc

SEQ ID NO: 11148 - DNA, 59 bp, synthetic construct
  misc_feature 1..59: note = Description of Artificial Sequence: Synthetic oligonucleotide
  source 1..59: mol_type = other DNA
caggtctggccgcgcttggggaaggtgcgccctgggagacagagacgggcatgctgagc

SEQ ID NO: 11149 - DNA, 55 bp, synthetic construct
  misc_feature 1..55: note = Description of Artificial Sequence: Synthetic oligonucleotide
  source 1..55: mol_type = other DNA
caggtctggccgcgcttggggaaggtgcgccctgacagagacgggcatgctgagc

SEQ ID NO: 11150 - DNA, 59 bp, synthetic construct
  misc_feature 1..59: note = Description of Artificial Sequence: Synthetic oligonucleotide
  source 1..59: mol_type = other DNA
gagccgccgcgcgccactactcaccgtctcctgggagatggtttccacctgcactccca

SEQ ID NO: 11151 - DNA, 57 bp, synthetic construct
  misc_feature 1..57: note = Description of Artificial Sequence: Synthetic oligonucleotide
  source 1..57: mol_type = other DNA
gagccgccgcgcgccactactcaccgtctcctgggatggtttccacctgcactccca

SEQ ID NO: 11152 - DNA, 58 bp, synthetic construct
  misc_feature 1..58: note = Description of Artificial Sequence: Synthetic oligonucleotide
  source 1..58: mol_type = other DNA
gagccgccgcgcgccactactcaccgtctcctggagatggtttccacctgcactccca

SEQ ID NO: 11153 - DNA, 35 bp, synthetic construct
  misc_feature 1..35: note = Description of Artificial Sequence: Synthetic oligonucleotide
  source 1..35: mol_type = other DNA
gagccgccgcgcgccactactcacctgcactccca

SEQ ID NO: 11154 - DNA, 41 bp, synthetic construct
  misc_feature 1..41: note = Description of Artificial Sequence: Synthetic oligonucleotide
  source 1..41: mol_type = other DNA
gagccgccgcgcgccactactcaccgtctcctgcactccca

SEQ ID NO: 11155 - DNA, 59 bp, synthetic construct
  misc_feature 1..59: note = Description of Artificial Sequence: Synthetic oligonucleotide
  source 1..59: mol_type = other DNA
gggagatggtttccacctgcactccatggcggcggcggacgctgagcgggcgggcggcg

SEQ ID NO: 11156 - DNA, 58 bp, synthetic construct
  misc_feature 1..58: note = Description of Artificial Sequence: Synthetic oligonucleotide
  source 1..58: mol_type = other DNA
gggagatggtttccacctgcactcatggcggcggcggacgctgagcgggcgggcggcg

SEQ ID NO: 11157 - DNA, 60 bp, synthetic construct
  misc_feature 1..60: note = Description of Artificial Sequence: Synthetic oligonucleotide
  source 1..60: mol_type = other DNA
gggagatggtttccacctgcacttccatggcggcggcggacgctgagcgggcgggcggcg

SEQ ID NO: 11158 - DNA, 58 bp, synthetic construct
  misc_feature 1..58: note = Description of Artificial Sequence: Synthetic oligonucleotide
  source 1..58: mol_type = other DNA
gggagatggtttccacctgcacccatggcggcggcggacgctgagcgggcgggcggcg

SEQ ID NO: 11159 - DNA, 57 bp, synthetic construct
  misc_feature 1..57: note = Description of Artificial Sequence: Synthetic oligonucleotide
  source 1..57: mol_type = other DNA
gggagatggtttccacctgcaccatggcggcggcggacgctgagcgggcgggcggcg

1. A gRNA molecule comprising a tracr and crRNA, wherein the crRNA comprises a targeting domain that is complementary with a target sequence of an allogeneic T-cell target selected from B2M, CD247, CD3D, CD3 E, CD3G, TRAC, TRBC1, TRBC2, HLA-A, HLA-B, HLA-C, DCK, CD52, FKBP1A, CIITA, NLRC5, RFXANK, RFX5, RFXAP, or NR3C1.

2-92. (canceled)

93. A nucleic acid sequence that encodes the gRNA molecule of claim 1.

94-99. (canceled)

100. A vector comprising the nucleic acid of claim 93.

101. (canceled)

102. A composition comprising the gRNA molecule of claim 1 and a Cas9 molecule.

103-108. (canceled)

109. A method of altering a target sequence of a cell, comprising contacting said cell with the gRNA molecule of claim 1.

110-125. (canceled)

126. A cell, altered by the method of claim 109.

127-285. (canceled)

286. A pharmaceutical composition comprising the cell of claim 126.

287. The pharmaceutical composition of claim 286, for use in the treatment of a disease.
